United States Patent Application Publication US 2026/0265781 A1 - sequence listing, part 15

SEQ ID NO: 118 - DNA, 18231092 bp, synthetic construct (residues 4,051,355-6,077,031 of 18,231,092)
  source 1..18231092: mol_type = other DNA; note = Hot spot 2 - Chr 3 contig ref|NW_020822577.1 from Cricetulus griseus
ccacccttcccaatacagcttcctgatgtaggaggtctgctttaggagatccttctatagactgagtatatgtgttgcttttattggttgattaataaagctgtttcagccaatggtcaggcattggtcaggcagaatatatctaggtggaaattccaaacaaaggatagagagagaaggaagcagggtcagaggagatgtcatgtagctgccagggaagggagatgccagtcagggtatcacaggcaagctacaaccacagattaatagaaatgggttactattttaagagagagttagccaataagaagcctaagccattggccaaacgattgtaattgatattaagtctcagagaggttatttcgtaagtggctgtgaggacccagtgggtagaaagaaaactggtccagtaggactagaaaagatggagtaaagtcctcttctacagcttcccattgatttctactcttaaaatagctctcaggtatttcttttcctctaccagcagacagactaccctccactgtacgggtgaggtcagccaagggtaaacagaacaccactgccaagattatattgtttcttcactgccaaaacttctcactgcctacatgatgaaatctaaactacaagagcacataagtcttcaagaaatgctgttgcagtagcccccatcctctatttcctagtagcaatgagctgtcttcaccctatgctgatgtgacagtctgtctgcacacaaactgtttctttcagtcatgccatttccccgctgattccccatgcctcccttttctgaacaagtcttagttcttgctttgaacacagcccctttgagaaagccttcactcacaagtaccttccacacagtacactctagtctcaatacttaatgtctgtctattccaggttagggcatggtagagagcctgtgttattagtctgtgatccatcaatgcacactgcagtaataaaatgcttcacacacacacacacacacacacacacacacacaaacctatacaacacacccctacatacacacacacacacacacacacacagatttttacttataaatcgaacccaagaactataaaccttcttaaaatggaaaactctggaaatagaagatgccttcactctgtagcaatccttcccacagaagaaactgcactgagcccttaagtggcagcagaaaactggtataagaaaaagtttaaatcaaaggaaatatagttaactttatttgatttaaaatgtcatatttaaactatgtacctaagatgtcaacaactgggagccccgatatacctacttgaccctgatttttgttgttgttaaacaatgagaagaaataaatgagcgccaattttgcctcattatggttacagggtagaaagtgtaagcagcagatgaataaaaagaagacatagcaaacaaaaaggaggggcttccatgcagccagcaaagcagtgagctgcgaatggcccagagctcagcctgtcactgcactgccatgttccctcagcaaccctactcctgaacaaaaataataacagtcttgaatgaaacaaacttttcaaaacattcttcaaaaacttctttacctttggcttacctttggaagaaaaactaaaaactgtctaatgaaaaaaattaactccaactgggtcctcttcctaactgcagccacacttacaaacacacccacatatcaatatgaggccaatgctgcaaactaaaaatcatatgctcgccccagggccactttttctggctctcagaaattgctgggcatgagctgaacatgatgagcagtgctgggtgctcttacaagcagctggataaatggcagaggcccattccgctctgacatgccacgagcatgtggcattagaatagcggtgctctgctccctgagatggacagatagccaacacaggaatgctacaattcccatttttctaaggaccaaaatcagctgcttccacaccataaatcgggactttatattttataagtgatcagaattccctagcaagctaaagatcaacacaccaagccccacacatcacagagtatgaactttgaacactaggagtcaaaataacgaatatgcagcctatatgcttccgagacggaagctcccaaattccaccaacaacgagataacctaaagtgcagtgactccaaagcatatcctttcccaaagaaaagccatttttctctctttgtagctgaaaaccaagacagttataattaacactttgcataaatcaaataggcaattttgctgtgtatgaaaatgctataaattataaagacatacgaaaacctagttacaaagtaatagcactatcattgtggtaatttataattatcttaaaacagaattaattaaaatataaaacatattcagccccaagcacacagacaaacatattattggcagataatagtatgttacctttcgctcatgagctcatctgagactttttgttcttcgtattccattttgtccttattggtttggctcatttcttcactttccaaaactacttcctcttgggtttttggtccttgtctaatcactttcaacttcctttttttaactttattccgggtaaactctggatactggtaagctctatcattgtccatctcctggtctctgcacccttcaggcagctgggtcattgtccttttgttggcgatgtcctgtgggagatccactgccatgcgctttaccttcctcctgcggcgcagagttctgttcccaaggttgtccacagcaaaatcagtctcatgccacagaagtcttttacctcgaacactgctatttaagtttgatgatggcctacgctttgccactaacatttggtcgtcagagtcactgtggtctttcttattattgttgtggttctctcgatagtccttacttgcttcctctaaactagaatcggagccttcacttaagccgtgaccagtctcccaagggtgatgaacattataggacctccgtttcctccctctccttttcctggcctggcgtttcagagggcaagacacatttcgagaatgatctcccgtttcagcaaacccacctcgggcctgctcagaactctcttccagtgcagagacaagatcgtgaacaagctcttccattgttcgactgaaatgcctacatgttttagagaacgagaaataaagtcacttggtgttaacctagttttccacataagcaattcactctaaatatggtataattttctttacaagatgtctgaaaggcatgtgatcgcactattcaaagtctgacagctttaatcttattctttaacacatttgttgcataagttttgtttttttttgttgttgttgtttgtgagtttaattaaacataggaatggctgggtgagaaggtatacacctatctataatcttagcactcaggaaactaagacagaagaattaagcttaggtttgaggtcagtctaggatatgtggcagactctgtcttaagagatagaatcctaattctgaaatcacttgaggacaggtaaatgcagtgtcaacaggggaggggtgctcagcaggtcaagttcttgctgcattagcatgaggatctacactcagatccccagcacccacgtagaagctggacatggtgcgcacctggaaccccagactccggcagagacaggcagatcctgtgcgctcggtggccggccagttaggaaatagcaagctccaggctgaatgacaaactctgtctcaaagagaataaggtggagaaatgattgaggaataccttcggatgtcaacctctgccaaccacatgcaacctcaaggatgaacacccccccctccacacacacacacacacacacacacacacacacacacacacacaggatcccagggtttttacatgattattctataatcatgggaaacattcttctatggaagtcactgtccctcacctgccccttatctaaaccaatcaccgtcaagctgtctccatctcttccctgactactaattcctaagtaaaggaggcatgaacccttctacttcccatacacttcacctcctcactaccataatgtcagagggagacaggcaggtatttccaaatgtgtatcagatgcaaaaccaaagtttgaccaaacagtgggcattgggccactaaacactgacaaacaagagatacagaaactgtattcaatccaaactgaacctcaggggtccataaggggccatcataaaacacattctgaagctgtcctgtctttttgctcagtaggcatcagcaactgtggcattttaaagctttaataaattacgtagttcattccaaattcaattcccaatgatgttaaattagttggtgtggcattttttaatgttataggtatgtcagatatatatacctttcttatacctctcaaattaagttggacaggcattgatattcccaagagtcctctagaggcctatagagcctatagagtttataagagaggtaaacacactttttttttttgggcagagggttagattgcaattagtttaggctgtggaagccatacagtctcttatcactcccctcctcactatagtgtaaaagtagccataaatgaatgagacccataaggtggtttgctttcatttaataaaatcaagtggtatccagcagttatccaacccttggtctatatcctctctagctgcatataatctctagcatctacaaacgtttaagctttagcaagactctatagcagtttgtaacttttcaaggcatacatggtgatttcatgggttttatcatctgcgctgctacatacatcatctaacagttgagtatttgctatctgctaatatttactaactacattgcctcattttgttctcatacaataaccctgaggtgataaacaaatagagacagcaacagccctgtctctgtgaccaatctaagtggcagatgcaggtattcagccccggcaactgactccagtgcaccagtgcttaccaaggacaggggcccaatcccaccagccactctgtgcttttgtttcactgcattacctgttaagacaggcttaatggataccaacatcaaagccaagggctcaaggctagttattcattatattgttttcaacagaatttcttctagaaagcctaactcaccacagaatacagggtagcatggctgttgaggatggctggcaggatacaatacgagcgcccagaaaacacggtgttgccttccagttaccctgggtttgcgtgttccagacctaactcttcacagcctcaatgtataaacaaaaagtctactcagaacagttttcagacacatggtgactcaaacactttaaagacactctagatggcagctgagattcctttcttccttcaaaagtctccatatataactctggtttcagaggacagcattaagtgacctatgcatcacacctgacttggttatcaagccaacaggggccatataactggctattgtgataagccagatggatcttttatctattacctctgtgttaataactgcctatttgttttttgcttattacaaagaatgacttgttcttttccttcaacacgagttctcgggaagaaatgtagtctaaaaggctattatctctgaatatgatattgcatctttaaacaaaattcactttaaagtttcatgtgcattaaaattggggtcctttctctaaaaatttctattattggttcaggaacagagtgaacagacagttcaaaacttcatgttaagatatgaaggtcatattcatattcattcatgaaattaatgaataaaataagtctccaagaagaatcacagttcattttaaaggtagcttggcatatcatctaagatgagaaaaggcagtggtcttagtgcctacttctttatttcctgtgtagaccctgtaagcctgaactgaaatttttcctcactcagctggagagctggcatcacagactggacccaccatacctggattagccagtgttcttaatgttagagcaggtgaatgcacccattcaatgatgctgtaatgataagcatcaactaatttttaaaatttttctcctttatttttatttcatgcatgttttgcctacatatatgaatatgtactgtgtacagtgcatgagaaagtcagaaggaggcgctggaggattcccttgggactggagttagggactgttgtgagctgccacgtgggtgcctgagaattgaacatgggttttttggaagacttagttgccaacactcttaactacttttccaaaaaacctagctatccagttccttatcacttgttttttgaaaaaggatttctataactaataaagtttaacaaaatataacctatatgactaagaatgcaagcaaattttcttagtattttattaaaagtaagctaccattactcaattttctattgtttctcttgagaaaataaaatactgtagctagaatccagtgacttctatggaatcattaaatcataaactgactaaaaattactttagaggattctttcaaaactgcagatacacagaaaaaatatttcatattatttcaattcagagttcaatcactttttacccctaatttgctctacttttccacaactcaattccaaccaaatccctgtggatgagctaacaatattaggcaattaatatattgtttcacttacatcttccaaggaaaaggacatcaattgtactaacacactttaccctagacatatttattttcttagacaagatcttacctaatagaggagaaacgaggaaatgtaagacttttctgcacaaagctacatttactgaacagccagagctttaagtgaattaatagaaactcagtgaaggtcccacttgattgagatgtttatattcatatgttaagtcatttgaagttaagttaagaggttcatttgaacctcaattgcaaatggaatcttaggaaatagcactgagtatacttgtctagagctgcagctcagtgatgatcttgtagtcctgctgtatttatagattttatcaaggaaatgagcacctgtgggtagtgttgggttatgctgagcaatataaaatctatttgttccaagatttgatgagccagttgttttcaaaacctagggcaataagtcaggcttgctttcaggtcatttttaggcactattaaaatgtcatctttgagttcttcaccactatttcaaaacaacattttcctaaagaatgcatgccatctaggaagatggattaaaggaacaaaacatggcactaataggtgtttttctcccccaagatttgttatggaagaactaggaagcagcccgtgtcttgcttgcatgtcccctggagattggtggatagagcccacagcacctctccaatatccttgctctttgagtctgggtctggctccataatctatgatcctcctgccccattctcctcagggtactgggattacaggtatgaatctccgttcctggatccaagagctcacacatggcagttaaatacatgtaagtagatagaagaaaaaggaaagacaggaaacagataatccttactcaggtaactattttattaataactacttcttgttgatgtctctattaccagcaactgctagtcctaagaagcaggcagagacaactgtttttcaggaatatgtattttggtcctggataccaatgaaatatcaaaatatcagggtaacaagagaatatttaaatgtgtatctactggttgactccactagtttattaaaataaacaaacaaatgaaactcttccaaatggaactacactgttccaggtaccaaatatcggaaaagggaaaaacaaaactcaaatacaatttatcaccgagtacataatcatactcacactgtcacatgtctgaaacacggactctttcttctgctaaattaaactacttattagttgcaactaagtatacattgtacttgctaagtggaaccacagatggcctacaaaaacttaagagtctacatcagggtttctgaaccttcctgatgctgtggctctttaatacggatcctcaggttgcggtgatccccaaccacaaaattattatcactgctgcttcctaactgtaattttgcactgctaagaatcacaatgcagatatctgatatgtgacccctgaaaaaaaagggtcatttaacccacaaaggcatcacaacccacagttctacataaatattataaatgtgtgtacatagtcaagaactatgcttatgaatgtatggtatatgactactcacaaacaagaaaggagtgatggaattctagttccatatcatcttagctactacatttcaagattaaaaaaaaaaaaaaaaaaaaaaaaaaaaagttgtctaggaaaggctatttaccctgactagaattcagcaaacagccaaaaggttcagatgaaagtgaaaacttaatagtagggattatggcaatgggtaaataaacatttaaatggtaaaacatgccactccaaagggaaaggttatattttatgactaatcaaacaaaaatatgatccacaagaattatcttaagtgtaaaaattcttaagtataaaaaatactgctcattggaacttaaaattttcctttcttaatcatcctgttatttatcaaaaagagtcttatctcaagttagaacagtaggggtgtggctcagtggtaaaacacttgccagcatgcccaaaccgccagcacaacgagctgacctagacacttatgaagaggctgcttctcgggagggagaatggccagcagcagttaagaatccttagcattcttccagaggacccacgctctatgtccagctctcacgtagctcagctcacaatcccctgagactccagctcagcggatgggtggggcagaggttcctacaacctctcatgacctccttggcacacacacaggatcataaatgaaaagaccaatccttaaaacaaaaagaaacgctgtcttatggcttggtgtggtggatcgtgcctgtgatctcagcactgaaggaggcagaggcagaattccatcaaatgttgggctagaccttgtcttcagtgcctctgactcctgctctcagatacagatgtgagtaacaagaggattaaagagcccagttaagaatcacagagttctcccagtaacggtgccaaagctccatcgagtgtgtccagttgcagagtctgttggaagctgcagctttctcactttggcactggaggcacttgagaaaacttcctttcctctttaccctagaaaatttttaagaacttagttggttgaccttccagtgttttttttttttttttttttaaaaaaaaagaagaagaaaaagtctaattctacttttaagccaatgatttaaacttagaggccattattttattttctgttactttacttaatgactgatacaagtcatcccaacttttctcattgcctctaattgctttcaatatgtaaattactcatttaaaaatatctaaatgaaatgcagtcagagtctaagtcaaacaagacaaaaattgtgaatttaaaaagtaattctgtgaacaagctttggtagggtaagaaatgacttgattattgcttatacatgataattgcacagtaaatatttactgaatatatatcttgaattcctagattaaatatgagtacctaccatattgacaaataaccagatggtaagaatatgtaggatgtacaaaccaaaggctgactcattgaatgtaactttactaagatcttcagacaatatgcattttaagacaggcattctaatagtttaagtaaaggcataaatgaaaacaaactatcaaagttagcttaaaggcttccagcttgacatacaagaagctatcctacaaatcatactttctattgctttgatcttcaacgaaataagaaggaaattccagaagctaaggtccagaatctattttaatggctttttactgttgttaaaacaaagccacaaaacacagtctgttgaaataaaaatagaccacctcagaaattgtatgttggcttacaaatctggacacgcattttcccaatccataaatgactacagacagatgctacatgagcctgacataacaggtacattagggtggtgagggattttctttaggtacacaggctagaatcacactgcaaataaatcacttagagaagttatttaaattaccttcacctctgttgtcatcttatctacaatgtaaagaatgtattgcacttacatgctacctcatcagtttacaagatgacatacatagacagagccaacaccaattaactactcagtagtagcaaccaccaacagcaaggcagggcatgcctccaaccccaggaattgaaaaggctgattgatgcaggtataccaccaggtagaagtcagcctgggctacacaacaaaactcaagcaggcccaggaaggagagaagaaaggaagagaaaggaaaaggggggagagttgacaaaaggagggacagagggaggggaagacagaacggttgcacagttgtgcttgtcaaccagaaaataaaggttccccctttggggcacacatctcttctgccaaccgggatgggctttgagaattcctttcaagagcacaaggcagagggtgctaaggacactcctgtctccttagaaatgatgagtgtcctgtcaagtaagaagtccagcaagtaaattccattcacgtaaccgatgagcaatgtgcaggggtatgtgcacagcaggagatgcaaagtggaacacgagggaaaagggtcacaggtggttttgttaactaccacacaaattcccttcctctccagtgagaccagaccaatctagtgagcgcattttacctccgttccttaccaagacatcatacagtgaaagaacacttgtgaggaagcaccaggatgctgggaagtccgtttatcatattgaagtgtggtggttcctccgtgtacaaatgccaagactaataaaaattaacacattaagaaccgtgcctctcagtccaagctgattaccactattaaaaaatgactcattttagaaagcactctccattttactatctgaaagctgcgagaacttaaaagtcactggaaaaccaacactcgctaagaaaaatgttctatagggtgtggagtaaagcatctggtgttagacattcccttaacctctcagctgtaggtgaggcaaaggaatctggttacacagcccatcggaacgtctcgtgttctttctgactctggaaataggcatgggctttaagacctcatttctcctcatttctttgacttattggtcagatttaatgtttcaagactgtcggtaggaatatcaactttcttgtgtcactacgtttatctgccggggaaagccttgggagaaacggggtgtgtggggccggggggtgaccggggctttcaactagaaaaacccacagcctagcacccacgggcacagggaaactttgcctcttcactttcccgtgcctgctgtagtctcctgtcgcagggatgccacgaggataaagtgtgatttttgcaaaagcggtctgaaaactggaagcaataggccacggccaccaaggaccaattccaacccaaacttaaggctgctgggcaacacccgtctctcgtgagccaggacagaaccttctaggtggtggagaacttgtaagcgttcacacaaaccgggctgcgcgcgcagggagtgtgggagcctcaggctcgcccactaagaaacttccacaactgtgcattcctgcagctccgtcactcatgggagtgggaacggagtgaccggctcagcgggggcggcgggaaccgggcctgaagggacttggtgcacggccggccatctgtctgtctgtccctggtcccgggtccgggagccccgcggggccgcccgcctgctcgcccgccccgtcctctgcggcccgccgctctcaccagctcttcccggcggcggcggcggctccgatcgctgggcgcccggcggccccgaacatcaacgacacccgggagcgcggcctcgaggctcaggcccgaggaccgacgccaactcccgcagccccggccacctccacactgcactggagcattttgagaagcacttccggaagcgggctggaggcggaaaccggaagccggaagcgaccattcgctcccctgcgctgggcgggtcgatcccatccgcgcctctggtactccgggaggagaagggagcgggtcggctgcttcgcttcccacatttaaaaaaaaccggactctcggtccggttacttgaaactgtgccccagagaaaggggaggggagtgagtcggaagtgcccgtggttccgcccagttgccatggagacccctagtaacaacttcagtaaacccctggcctgaggccatggctactttagccaagctccaggctcggtcgtcgtttctagaaactcagtactactttaggaaccggtgagtagtgaggagaggggtcgcaaaagacggttactgttaacagagtatttaatcctggaagtagccccccagttctccccgacggggactcaaacttgatcgcaagtatgcactacacaggtggattacatatgtacacagagaggtcattaataggttgaaatgcgctatagagaagtccagcgtagataagattataaactgaaacccaaggtgaagtaacccctcactggggaaactgaggcaggaggatcactctgagtccagtccagccttggttacatagacagttcaaggcttccataggcctttctttctcaaaatactgtgtttttgtttttgtacttataaatcatcacggaacaatttggtttggtgaaacctattttccatactaaaagtttagtgtggcctaattgatgttgcccaggctaccctagtaagttccaggagttgaggaatgtcagtatccaaaaaggaattttggcttcccttatctcacagacatggaattcaattgttttgtcacatatttgtcttaaggtgtatgttcccaaaccactgtgacaaggtaattagtaccagtgaatgggcaagtgccaaggcatcgttctctaccctctaccctcaaccccatccatgaaaagtgtcctttaaactggaagcaacgggccagcagtttttctaacttagaagaaaccacaaaaagtatattacatcgtgataaaatacagtgacctaacagaccagttgaaaaatacgccagtgtgagaaaggcctgcaaggcctacagttttttttttttttgttttgtttttttttttttaatttcgtcttggacttctaacaaccaacatgggtgatggttcagtatcgtcatttttgtgagatagcatgagtcttccttgtgctagaagtaccacagtgttgcccccccttttttttaacctttatttctgtctctagtgtctttcctacttctgaattcttatatttagcattcaaaaattaacattcacttagggttacatgacaggcttttatttatttatgccatcaatatataaactgaaaccatttccatccttcatgacagcctgttatggaacagagtcatttcaagaggaaatgggatggattcttaagtcaaaactgagctgcctccggtttctttgctgctagctggcattcatagtgccaggacgtgctatgcaggctgttggaggaaacaaatcatgagggatcacagtcagctgtaaatcttgtgcgtttaagaactacccaggaaggtatatccactggtgcaatgaggacatggatgttctgggggcagccaactccttcctgattggattagagaactagaactggacaaaagcttggttaggaaggtcacaggcaaaagaggatcctataaaacgtaaatgtgggctgtgggcagattgctgagaggataaaagcatctgctgccaagccctgtgggccaagtttgagccccaggatccatatagtggaaagatccctacaaggtgtcctccgacctcctcaaacatatgcgtactataaattaaaagcaaaaacaaaatgcaataaagttttagttaacctatagaaaactcagtgaaaatttgtcaacgtttattggatatactagttcttcctgagcgttaatgtgctccagaatcatctgggcaatttattaaacatatagattgtgatccagtgtttctcagagatggaaaacctgtaaccctgatgggaattcctgtggggctctacttggcatttaaaaaggaaactgtaggaaaagaactgtgcagcgttccagctgcagttctttgacattctcctgcggagtatatttattcctactcctacatggaaagagaagtgcgcatctgttagggtgccgtctgcgtgcaagccgtcacataacgctgcgcactgccactgagcaaaacacttccatccaactggcctggctgtcgaagcgggaagtaccaagctgtgccagtctacatggcttgaggaaaccgctgctgagaatccactcacaggaagggagtagtcttgttttcatgccattcttctatgtcgccacgtagtggcaaaaaaatatctctacctcattactggcactagaataatgctgaagaagatgattttgttgagaaaatatatcactgagtaacaagatttgtccgtttcacatgtcaaattttctttaaaatactacttgtaatattaatgttgatcctaccaggcattttggctcagtcttgtaaccccagcacttgggctaaataatgtgctcaaagtcaacctgaactatttattatgtgagatcttatctttaaaaaaaaagattctactttatgtcataggaattatatgattcccatattattactgaggcaaatttggagtgctttaatcaaaaccaattcatgatgggctactttaatcagggatgtgcacaccctgtcccctgacagccacagccctgtcacgatgtgcacatgcgctcataaatgtagggtttaaaagcatcgaaagaaataaaatttgtacattctgatcacaatggtccctgttttctgactaaagaaaatactcttgtctccttaccacccatttcttcaaggagcccttattccttttacgttccccttgtcattgggtgtgctttctggatattgttactcttaatggatacagctagggactgtgtatatatgtgcaccaagacacatttataccagtgttgatttctgctagggactgtgtacatatgtgcaccaagacacatttacaccagtgttgatttctgctagggactgtgtacatatgtgcaccaagacacatttacaccagtgttgatttctgtgtcagtccgtgtaggtagtaaaagccaggagtgttacgataaatctttctgccaaaagcagcctaagccccaccgacacgtgtgagctttgcaccggccgcccgcctgagttagggcccaaatgaatacatagaaacttgtattaggttcaaagctgcttggacaatgactaggattctcatctgttagctcagtctcaattatcataaatccatatatgttataagacttatcttatcggacgccttattggcatccctccttgccggtggatcacatctgctgctggaggaggaaggggaaaaaggggccattcatgtctgaatcatcacttctctactacatttcccagaatactctttgactcctagtcctgcctaacttgccatttcattggccaaacagtattttatttaacagtcaataagataaacatacacagtacaatccccatcacaggagtgcattttgaaaactgtttcatattcagcaccctgagtttccttctgtagtactctgttactctactctcctgaacccccagcattcctcttgtccacatgtccacatcctaaatagctaaaaaccaggaatgcaccaccagacctggcttctcttcctgtttatgcttactttattggactctctttcctgtgtgtaaccaaactcctctcgacacagagggtacctcagtctctagcatagatactcttcttgatgcagtctgtctccctaccacctccctcccaaaccaacatttgaggtttgagtaactgttgcctaccctcacaggtagactctttcttcaccttgccatggtgtccccaagccaagcttcttgtccatagagcatgtctttctagggcatacaatgagaccctactccactcagcctcaatatgtgggcattcttcttctccatgcagactctaacagcccatctgactttatccctttataaattgtccagcagagacatatttttcccaaacccattacttatgcatttgtttaggaattgaggaacagtaattaggagatactttaacatgcactaataatagaaatctttgtggtaagcagtgatggttcccgatttatgatctaattttaaggttctttcagccccacatttattaatgagaatattaatgagaaacaaaaatggagctcccagttcctaagagtagccctgtctgttggcatcatgtgccttttagcagaacacagtgatgattataatgtaaaagttgggttaagtacaatttctccctttaaggagactaaaaacttaaggactatatgcaaaacagccattctacatatcaacacatctgataacataggtcagccaatgttagaatagtatccctacagtctgaaacagttatgtattgtctggtaatgaaaagggaagactattagtttgtaaacttgtgtttatttattcatggcttatgtatatgggtcagactaagtccaggctgcagatgtaaaaacagtattggcatattactggaaagatactcaccagtatactctttcattttttctattccctgccagttatttcctggcccctgatgggcacacatactattcagagttaccatgcctatagttgatgacaaggcaaccagaaacttcctgcttcctcttgatgttttattgcattgctgttaatactctgggtcttttatcattattaattcattcagtattcactgtgataacactgatcataattaatttatttcaaacccatgaagatgtcataatttattcactgctacaggatttacattataatctggaactaattattttaccattaaaataaagtgctacccccagtttttcattttaaatataaaataactagtggttcttgacatagtgtgagcactaagcatcccagtgctaaccaaagtatctgtaaatttcatttgaagcagtttcttttaaagaacaatagaaaaatatatctatggaagtaagatttcagtatgtaagttaaaacttagtggtacattggctactagtgattttttagtgtttcttccatttagtgatatatatatatatatatatatatatatatatatatatatatattgatgcagcatacctttgtatttatatacattattgttaataccccagaaacagattaacttgccagttgactggtgtcaccaggaaagattttaaaacaaacttaaaatgctgtaagtttttctgcttatattctgggtgtccattgacagaaggaaatgatgaattcactgtgcattataccaacagtgagtgtaataactaacgtgtgaactctaaaaggtattaagtgaggctttgggccttattcccatgtctctgttgcagaggtctgctgactgttgatagggaaaaggaaaacatgttttcagttatttaaacaggtggtattaaaatgggaagcagatctagtagagtcacattggatgctgatggcaaatggctaataggaagagccagcgttattctggatcttgggtttatttcatagcttccttgctgaatggaattttcttcgaattcttctttgagcttcctgctgtaatggacactgtattgctgtgtccttgttgtgtgtgtcataaatgacatttttatatgcctccccatcagatcatgctactaactcaaatataatttggaaagaaaaatgaaagacttctccttacgctgtagcgccttgcacagcaaccttgttaccatggcatctggtagcatttgatacttgtcaatcaagtaccaaaccaattcctttgtgatgtatttccattcacttctatgacacagcattacatttttatcttgcatttgcattttccttatttagtttcattctaaactttttttctttttttttttttgttttttaagagaggatttctctttgtaacatgttctaaactttataaaccaaagattgttacttatggggatgtgtagttcaccatcagagtgactatactgtattcaaagaattccgtatctcttaatatgacctatcctactctaaaagtcacagtcttctgccttcttttccagtcttacctgttttcttttatttcttccctcctctctctctgtttcttttgtcagtttatcagctcttccaatgtaccagatactttaatatatgtaggaaatagatacgagtaaaatgtgagcccagcctggaagccttgaagaataaacatattatagttagtgtggagaagactttaagcatgaggatcaatcttcctggaggttgtagttagaaaaccaattcaaggagtaacttggcggtccagtggcaaggagagagtgatttgttcatggagtggatggaatagaaagctctattgtgagttggaacaatgaaagaagatatggggattgtgtctaggccggatggggaagatttttgtttgatgtactaggggcgatggctttattcagaagttttgagacatcatctggggttcgatatttaaagctctcaaggacacaagggcatgattagatttgttttcaaaatatgatttaagagagcactaaggtggcttaacagtaggaaactgccaggtgtaaagacctgagttcattgtcaggatccacacactgggagagaaacttctccaagtcatcctcttgcctgcacttacagcccccaccccataaaatcagtaaatgatgttataaagtgttttaaagatcatttttcccaggtgttgtcatacatgttttccatcctatggggcagtgggcaagaggatcacagttttagtccagggctacacaaggaaaccttgttccaaaaaaagaaaaccacttaatcaggactggatgagagactagagtggaaaaagaccatttgggaaataaggcttttatgactcattagttttaaaggggtgaaggctgaactaatggtgactattgcttctaaatctgatggcagcttttttgcttttttgctttttgcttttgataacactgttttggtaacactgccattcttgacaaagagcaggttggaagcaggctgagacatgttcctgggcctgtgttgaaaccaaggtacctaaggagaaatcctagcaggggcattttagatacagtgcttaggagctctgcctctgagagaacttgtcaaatgattcttttaatcccttcttcccatgttgtttcctaaaaacaatctcttccactggtgatttttttaaccttttaatgcactatttaattcttcacttattttaattagtgttgtcttcaggaatatttggaagctcatgtacatagaatgtgcacgtgcatgcctttgagaagcatactagctcacacacagtttttatgtggtaaataactttgaattaatgaataacttactggccaactagtatttgtttttcccagaagcttcagagatgacattttaaaaataatgtaataataagtaaatagatgttatttatttgtggacttggagagatggctgcatcattaagagaaacggctgctcttgcaaaggacccaggtttggttccagctcccacattggtcagctgacaaccacctgtaactccagttccaggtggcctccatgggttcctgtacccacatagtggagtgtactttctattcaggaatagatacttgaagtaaaaattcatttaaaaaatctttgttttgaattgggataatgctgagttattcaggtagactttgatatcctggagtgcagcagttggctctcctatccccaatctgctaaatgctgggtcttcaggaacctggtgttcggtcctggcatttttcgatatggctttgatactattcaccactcttcctgctagcttctctatgagtcatagtttctaagagattgtattggattctttcattttcccacttttcaattgcaaacaaatcattgtgtggctgttatataatgacataatgaatcagaggttaataaaattctcctttcaggttttattcctcaaattctggattgtgcatagaactacacttctttatgtgcagtatcatatgtgttctgttaaggtttcttataaatatcagaacaaaatatcgtgttgtatattttccattatgctttatctatccatttcagacgagttgatatttaattttctacaggaataaaattgcattccatgttggttctggaccagtctgtctttcattaggttgctctttctgtttcaatgtctaatacagtgctatattgtgaaaatacagctctaaccatttggtatagtcagaaaatattggcgttggtggggtgaaagatagctggtgtgggctaatccgtccctgccttctctgggacggatgctgaggcatttggtgtttctttcaagcctcctctgtcttagatttcttcataaatgccttcaggaatcttccagtgtcatgatcttggatggtgaggtcttagcaggtgcagtggccaagggtgaacctgctgggaatgcagggactacactctcatcacagcatttcgttaagcagggcttggatgcaacatcagtatcagctcaagtgtaagagcttgccctcagatatacagcatgtttacttccttaaaaacagcaggacctcttcagtgaaggcttgccatgcttagttgtttaaataatggttaaattcatactttttcactttcataagaaggccctttcagccactctaaatacacagaatctatattctcagcttacttgcctttgatgctcttgaaaacataactcaggttttgtttatgtgtttgagacagggttccatgtagcccaagctggcctcagacttgccgtgtaactgaggatccttgaatcctgatcctccccagggttgtgattgctggtgagcaccacctcatagcttgttgtcccccttttctttcctggctcccttcctccctcctgtctcctccagctttctgtcccctccctttatttctccttaagtaagttatgccttctaaaatttgcggattccgtctgtagataaattttagaggtgacatcccacaaccagatcctttgtttctggggaggctatcaagaatgcagagttggcgactaagcttcattgtgtggccttgggaagtgactgaggctctcattattatagccagcatcataggccaccagctctcaatgttagagccagcatcataggccaccagctctcaatcctgtgattgtgtttcctgttttacctgtagcgattccacacaaggctcactttctgctgaatgacacacttgataaaaatgataaaaagcaacttcttaatcctacttgggaggttgaaggataattgatgttctacaaaatgtaagaaccttcattgacatgaaaagtgttcttttttatagagatttgaactttccttttaaaagacagagtctcattgcttagttcaggttgtccttaaacttaaaatccttctgtctcagcttttcaaattgattacaacactcattggtctgtgaacttggatggtcatttttaaatcacatcccaggtagtgattggggaggtagtcaagctctcaaagacctgagttcagtcctccgctcccatgcaaagatgtggcatgtggggtgaagctggtaatctcagcatggggccacggcgagcagggcttgctggtcaaccatcgaagcctatttcttgaactccagacagtgacaaaccctgttccaaaacaggctggcacctgagcaacaacatgaggttgttggtctcttcacatatgcatgctcacacaagtaactgcacctccatgaaaacccagaaatgcacacatgagcacatgaagacacacggaatgtggaatatggtcagtgtatttcctactctgggatttatttctgtaaaagcctttacttcagaataggaaaaactgtcctaaaaagaatatatttttctctattatctatttatttatttgctttccaagttaatatttcttgtgtttaatgtcttatatgtttgattcccgtctttgaaataccttatcagatttgtggttgtgtgctattactgttggagatttgcaaattgataatgtaaaaattctagggttactttttttctaacctatgaaattgttttccaattgtttggtcttagtgacaatgctgtgatttatctatctaggccccatgttacctgtcatccgtgcttagatacatgtgactggtgggcatcctggatgtgtctttgtagatatgcttctgtgcacagatgtgtactctaactgtatttgaaagctgggagacggagaggaccaacatatggagagagtagtttgtatgcctggcagctcattgacactttaactgaagataatgcatagggtgtgtattcttaaattatttttttcatttcatgtgtgtgtactacatttccatcattgcctatccctctaacacctcttgtgacttccctactgcctctcaaattcatgatctttttctctgtttttgttacacagacatgtaaatgtacaaatatataattacaaccactgaatccatttagggttgtgcatatgtgtatgtttttagggctgaccacttggtactggataaccagaaaactggttctcctctctcagcaaccgttcactgcttgtagctgttcatctgggtgtaggatccttttctccagttcctattggctagcctatctgaatcagtgagctccaggtccagtgactccatgaaaacaaaacaggaaaaaaagatgaagggtgtttgaggaagacacccatatcaactcccagatgccacacacacagataaccacctgagcctggatggtcatatgcatatacctacaataagaaagaagtgttgtcatatgtcctactgtgcccattcaacaaagatggggcactactgtatgccaaccaccctctaacagaaatatgttctgcagtccattgtgctattgctttatcaattggcagttgaaatgcaagataatattgacatcggttaggatagatacataaagatgtcttgactgaattttttctcattgtaagtcagtaaaacctaagaattaagtttcttatctttttataagcctgtggcacactcactgaattctttaatataagcaggctcttaccagagtaggtattttatgatagattcttttgaattagaggcagtacatttaactgatgagtggtttaaatatgcaggcattttactttgcatgatacatgtgtagtggcatttaaactataagttcaaataattatgtttttaaaatactgacaaagtagcacattgtttttcatttcctaataaaaatgctaccaaattaattagtcgcataacagatgattataaaaataaaataggcaaagctgttgaaagctcatggcttctcagagaaaggttaatttttgaaactgctcattttttgaaatgtgctttttaaatttagtattttaatttctttaaaatgacatgtgagttataattaccatctttgcgaaattaaaaattaaggttaacaggttgacttgccttagaattgcattagttactaatgaaactatttgaaaacatgtttcagtgccgtagacacatttaggaagaaagagaacgatgcagctgtgataatccagagctggttccggggctgccaagtccgagcatacatcaggtacatttgctttaccatggaaacctcatttacaaaccagagttcaggctttggagaaccacaatttgtttgtgtagcatttattccagacaccctcttatttcaatcagtaatgaagtcattaaagggatacggaacactatttcttactggtatgtgaattatatctgccatatacatctttaacaactctcagtgttgtaagcacatttgatcagatcccccccccccatgaagtgcatttatggtagcaaaccaactaatggatcacaaaagggacttgggaagaggaatcttcatatttctcaactgttggttgatgaaagcagtggtgttaaaatgatgatattctaattataatatgatagatccaccccatctcaatccctcccatgctattcttcagtgcacagagcatttttaatgttctctttgattctgaggaaaggtaggcagtacagcctgcctagcacttgcctggtgtgcacacaaggtcctaagttcaattcctggtgtcatacctcacatgtgaacaaatattttcctagtaagttacaggaagaatatgccttgtctgtataaggtgtatgattcacaacacttccttattttatccagagttgtaaaatccagtttgtaaagtgaggcctctgctttcaccttagtgcaatttagaagcatggccatgaagggattctttaaactcctccaactcacatgatgccagaaacactggagaatatgagaaaccacaagggcatgtttgttgatataggaactatttttctaagctctaaacatgaaattcatcagtaattcctctgtcatttctcaacataacaactgaactgtgcatagcacacaattttgaagtattttatctgtgcctagtagcacaggcctgcccctaactatttggaaggctaagccaggagaactgcaagttcacattacagggtgagttcaagggaagcctgggtatctcaatgtatacttgattaaaagctgtggatgtaggtctgtggtagaacacttgcctagcacgtaaaaaccctagaggttttacacacacacacacacacacacacacacacacacacacacacacacacagacacacacacagacacacacacacacacacacacacagacacacacacacagacacacacacacacacacaacacacacacacacacacacacacacacacacacacagacacacacacacacacagacacacacacacacacacacacacagacacacacacacagacacacacacacacacacacacacacacacacacacacacacagacacacacacacacacacacacacacacacacacacacacacacacagacacacacacacacacagacacacacacacacacacagacacacacacacacatacacagacacacacacagagacacacacacacacacacacacacacacacacacacacacgagaggctatgggaataaaatgataaggaatgaaaataattgaatttgaactaataatcaattagaaaagcaagaggaaggaagaatgacagttatctcgtgctgcttttctatgtgtgattagtaatcctccagagtaagttctcattcttcaaaagcaccagagattcctaattgtagatcttcagtcacagaaagctagggagagcaacctcatacagcagaaaactgctaagtccatgctgagggcaggtgcaatggccccttcccagatgtgtaactgttgttgtggctgactgctgaggaggggtcattgtggcagtgaaggcagtctgggggacatatggcacagcatgcccacaagacccaagggcagctgacaagtcacctatttgccccccacccagccatagaagtacggagctcactggtggggagtcccagctctgccatgataaggttggccattaggaaatctgagcaaccacaagcctcagtttccccaagtatgaaatgtcaggctctttctgacaactctggcagacaacggcacagccttttctggctgagaactcatcttaaggtgaaaaaaaaaaaaaaacaaagcatttgcagtcaaggaaaaccacttgcatacagacaggcatggtaggacatgcatctctgtaatcccaatccttggggggtagcaatggtagcgtctccacacatccaaggcaagccaggtctatagaatgagttgcatttttttcaaagagagaaataggcaaggtaaaatagaaataataaaacaaaaataaaatgaagatacctagaaccttacacttgaatttgaccttgtgaattataagacaataattttaaagaatgaagaaacatcatcttggtttcagcaaacacatactaataaacgtgttttcatcataggcacttgaacagggttgtgacagttattcaaaagtggtggagaagtttcttaggcagaaaacaataccgacttattgttgaggtaaatataaactttctattatgccaagatttgaattattcagcattctgtaagatgtatttttacatgtagtttagaaattactcatgacaaattgttgtaaatgaactgtttctatatgaattgtccccaagaagtctcatgtactgaaggcttatagtagtttgggaaattctggaagctttaagaggtagagtccacctcaaggtgggtcccttggagtgtgtctttgggggttgtcttgtcccagccctcacctctatttctcctagctctcctcttccgttgctactacacccaactcagtgatcagctttgttcctctctgctgtacaactctacctgatcatggtacagaaacgatgatgcccactgaccattgtactgaaacagcaaaaaccagggccaaagtaaaccctaccttttaaatgcttataccagtgcatagaggataacacaagggcaaatctgagcttaactttggaaaggagacttttctgagaaatttcttaatttttcataagtgacaaacttcattgtacataaactacattagctacttcaattttaatgtgtttcactgtgcacatttcatgtgcctatggatatctggacttcctttttaatttttatttattttgtttttgttttttgagggtttctctgtgtagctttggagcctatcctggcactcactctgtagaccagactggcctcgaactcacagagaccctcctgcctctgcctccagagtgctgggattaaaggcgtgtgccaccaactcccagctgatatctggactttctaatgaggactttgccatcatgctcttgacttatccttgagtctcccccattttcaatggactgacaggttgtcaacaagctcacaaggatgttaactaggaaaatgcagacatggcttctctccaaactctcctttctacagagttgttttatagataaatgagatttcaaaaatcaggaaataaggctggtgtgatggctcagggaatagaggcccttgtccccaagcccagtgaccacagtagagtctccacaacccacatggtgaaggactgcttccggcaagctgtgctgacctccccatacctgccatggaacacatacacaaataaataaataaataaataaataaataaataaataaataaataaatgtcatcttcaacaattttaaggaatatatttttaaatggcttcattgaatatttacatatttgtaaatatgtcactatatgtaggggaagctgtagccacgccttcttaggggctggctacaagagtacctgagggcttgtgagggcgtggtcagagtgagtagggggactgtgttttcggtttcggtctctctttgttgcttgctgtacagactaccaccggctggctggttcgctctgtaagtaaggctttttcctattaaatacccttatatttctacctgactccgtattggtaattttttactatatctggtgtcagaagtgggatttcatctgggcagccttttctgggtcaacagccaacacatgctggtaatgacgaatggtgtgcaggcggtctttattctcagcacgcacgtaacggcgcagagcctttctacagagttgttttatagataaatgagatttcaaaaatcaggaaataaggctggtgtgatggctcagggaatagaggcccttgtccccaagcccagtgaccgcagtagagtctccacaacccacatggtgaaggactgcttccggcaagctgtgctgacctccccatacctgccatggaacacatacacaaataaataaataaataaataaataaataaataaataaatgtcatcttcaacaattttaaggaatatatttttaaatggcttcattgaatatttacatatttgtaaatatgtcactatatatttgcaatttattttgataagcagcaaatgattgcatggtgtctttatgctggttggtatttaacaagtaaatgctacttgccaggcattttgcaaatgtatacatcaagatgatctttggaatttgcctttgtctatgtgtacttggagccagagttcacatacttaaaactttaggtggttgtaattgttttacatgatgtaacaactctgctcattgctaacatccttcattaaacttgccaagacacacagtgtgcgtctctattgttgtattctctcttcaagatgcttagcacatagtgtcttatgaccctttttgtgaatggatagacagtgaaaaccaatgttttaaactacgttgttgctgctccttttattaagaagcagagccaaactggacccaactggtcatcagcctgatgaccacatgtctaaccccttgcatcgtttggttctgataatgcactagtcaaagtacaagccttcgagttagtcaaatgcctgtttctgttggtgtttagcattttaggttggaaacttttacaagtacataattccctgggtgtttcaccctctaggctggagattttctcttatttttcagattaaatgtcaggattttgggtaattgcctattgtttaggatgcatttgaatagccattattgattttatagtgtacataggcagaattctgcttctatttgaacttaatgatgctattttaatggaaaactttactttgtccttcacagagggaaaagtgtcagcattatgttagtgtttctgtcagccgtttcttttgatgccttttagtgctgtattttagaccctctcatttctttccagttttgatatctggctttcctttataaaattcactgtacttttattttttaagaccatttaaaaaggaattttgaagcaatattaggtgtatagaaaagttataaataagtacaaaagacttccataaagtagtcagagtgttgctcttagagaaaagagttgatattattactttcttgtctctatatacatattgttttgtgtatgtgcatttgtatgcatatttgtatatgagtggggacccacgtgtgcatgcatttagaggccagaggacagccttgtatcatttatcatatgccatccatcttttcttgagacatgtatagatatcagctgtgcatatggacagttcatgcagtctctgcagggcaaggaaatgacccttgaacttagccttggagaaaacagtgtgaaggaagttttggggtataagcttggaattggaaacaatgaaagcagtgaggatgctaatcacatggtccagggagtatgaagaatagcagaaactcaaagcaatttacccctagtaatgttttgtgaagtgaaatatacagaggacattgccttcatgttttaggtggctcacaatcattcatgcttcacctcttccttctcctgttggctggaggcggggccatgttgagagctgatgggacttaggtcacacctcagctgacacttcaagaggattttttgttcttgacttctgtcacaagacctcatcactaggctactgcttctgccctaggcctgagacaaagagccatggaacatccagacagagaactttcactcacaagaaagagaaacaagttttgttttgtaaactcctaacttgattgcattttcacctcagcaaagctgcataatagtttccctggtaaccaaagcaagttccttatgcatgtgagccattctgcatgtgatactcaggcttggagaactgtgcttggaggtttgttagccagtgctaatgataggacatagccatgggatcattttttaaggcattgatgctgtctcagcagacagctggggccatcataattagtattcaatcgacatcttttaaactgagcttctggatgggagcctagattaaggatcaaggtgacggtttcatggttatcactattagtgacagcatctcccacctcatgaaaaaggtatccaaaaggagagcaatattcaagatgtggggtttagttaaaaatgagagtgagcagaagagtgtgctggtgcacacctttaatactagcacttgggagacagaagcaggcagcagatgtctgtgagttctagagcaggctggcctacatagtgagtttcaggatatccagggctatgttttttatgtgaaatggtgttttgagcacgtgcatatctatgtgagggtgtggtctcctggaacatgagttacagacagttgtgagctgccatgtgagtgctgggaattgaacccaggtccactggaatagcagcagtgctcctaacttctgagccgtatctctccagtcctggtatgttcatttttcattcagtccgaagaattataaaattgccttccttattttttccttggccctcttctattgttcagtagtatgttgcttaatttccatgaggttgtgtagtttctgtacttactattgctgtcactcacctgcttgctgtctcccaggtgatcagatagaatgcaaggtgttacttcaacttttctgtatttatgaagacttgtgtgtgtcctaatacatggtcaatttgaagacagttccatgggctgctgagagtcatgtatattattttagtatttggatagagttagatttctgtgaggtccatttggtttatgatgtctgtgagtttctgtccagatagcctgtttagtggtgagaatgcatgtcagggttacctaatatctgtttggattcatctgcggtttccagttgagtagtatttcctttatgaaattgtgtccacctatatttggtacatacaggtttagaattgttatgtcctcttgggggattgtcccttaatgagtattaagtggctttctttatttttttcttcaaccgtgaaatagtctatatggtttattcttttttattttactttattagttcaaattaggaacaagcttgcttcagatgtcaattccttctctccctctccctcccctcccccccaacatcccacctgcccctagccatccctcctccactccccaggcagggtaaggccctcaaaaggggctccccaaagtctaccacatcatcctgggccaggcctaggccctaccccatgtgtccaggtcaagagagcatcccttcacaaattttgggctctcaaaatcccttcctttttttttaagaccttacatatttaatacagtgcgttacctctgtacaaatggaaaaaaattaagttcaacatttctagaccaatatggctgctaatttttgtacaatgccaactcaacacagtaaactgggaaaattttttccaaagttgataacacagctaaagtttccaaaaattcaaattatatatgtatgtatatatacatatatatatgtatatatatatatatatatttaaataaaaagaccaatagtggcagtatgttatgcatcaatagcagcaacagcttttccaggttctgcagtcatttgaacaaaattgtagagacatccagcactctccagttaaaaaaaaaaaagtaaaaaacaaaatcccagaaaaacagcacagttctgttactcttgtggtacctggcaccattttttttaaaaaaacaattagcttctcaatcatcatctggaaggaaaccattctgagcaacatcattaaaaacagctctgataaagctcagtcactactatgtatcacaaagcaggtccacagaggagtgagtacatatcatgtttgatttttcgtgattgggttacctcgctcagaatggtttcttctatttccatccattttcctgcaaatttcaagattccattgttttttttcttatgagtagtactccattgtgtaaatgtaccatgttttctgtatccattattcagttgaggggcatctaggctgcttccagtttctggctattgccaataatgctgctgtgaacatcgttgaacagatgtccttgttgtatgaatgtgcttcttttgggtatatgcctaggagtggaattgctggatcttgtggtagactgactcccattttcttgagtcgccatactgatttccaaagtggctgtacaagttggcactcccaacagcagtggaggagtgttcctttttctccacatcctctccagcataaaccctcattggtatttttgattttagccattctgacaggagtaagatggtatctcagagttgttttgattggcatttccctgatggctaaggatgttgaacactttcttatgtgtctttcagccattttagattcctctattgagaattgtctatttagttctgtaccccatttttaattggattgtttggtgttttggagactagcttcttgagttctttgtatattttggagatcagccctctgtcagatgtggggttggtgaatatcttttcccagtctgtgggctgtcgttttgtcttgctgatggtgtcctttgccttaaagaagcttctctgtttcaggaggtcccatttattaattgttgatctcagtgtctgtggtactggtgttatgttcaggaagcagtctcctgtactgattaattcatgggtatttcccactttatcttccagtaggttcagtgtggctgggtttatgttgaggtctttgatccattttgacttaagttttgtgcagggcaaaaggcttgggtctatctgtagtcttctacatgtttgcatacagttatggcagcaccatttgttgaagatgctcttttttccggcatatatatttggattgtttgtcaaaaatcaggtgtttgtaggtgtgtgggttaatttcagggtttttacctctattccattggtctacctgtctatttttgtgccaataccaagctgttttcaggactatagctctgtaatagagcttaaagttagggatggtgttgcctccagaagttcgtctattgtacaggggtgttttggctatcctgggtcttttgtttttccatataaagttgagaattgttctttcaaggtcagtgaagaaatgtgttgggattatgatggggattgcattgaatctgtagattgcttttggcaagattgccatttttactatgttgatcctgcctatctaagagcatgggagatctttccattttctggtatcttctttaatttctttctttagacactcaaaattcttatggtacaggtctttcacttttttggttagtgttactccaaggtattttatgttgtttgtggcaattgtaaagggtgatgcttctctgatttctttctccaccaatgtgtcatctgtatatagtagggctacagatttttttgagttaatcttgtatcctgccactttgctgaaggtgtttatcagctgtaggagttccctggttgagtttttcgggtcacttatgtagactatcatatcatctgcaaatagtgagagtttgacttcttcctttccaatttgtattctcttgatctccttttgttgtcttattgctctggctagaacttcaaggacaatattgaagagatatggagagagtggaaagccttgtcttgttcctgattttagaggaattgcattgagtttctctccatttaatttgatgttggctgttggcttgctgtatattgcttttattatgttgaggtatgttcctgttatccctgatttctccaggacctttatcatgaagggatgttggattttgtcaatggctttttcggcatctagtgagacaatcatgtgatttttttttcccctcagtctgtttatatggtagatttcattgatggatttttgtatgttgaaccatccttgtatctctggggtgaagcctacttgattggaatggatgatttctctgttgtgttcttggattcgatttgccaatattttattgagaatttttgcatcaatgttcatgagggatattggtctgtagttctctttcctagttgtgtctttgtgtggcttgggtatcaaggttattgtggccttataaaaagagtttggtaatgacccttctgcttctattgtgtggaatactttgaggagaattggtattagctgtactttgaatttctggtagaattctgcactgaagccatctggccctgggcttttttggttgggagacttctaatgactgcttcaatttcattagaggttataggtcaatttaagttgcttatctgttcttgatttaattttggaaagtgaaatctgtccagaaaattgtccatttcctttacattttcgaattttgaggaatataggttttcaaagtataacctgatgattctctgttgttatgacccccctttcattcctgattttatttggataaaggtttgtctatcttgttgattttctcgaagaaccaatttttgtaatattgattctttgtattgttctcctagtttccattttattgatttcagccctcaatttgattatttcctggcgtctgctcctctggggtgtgttggcttctttgttttctaaagctttcagttgtgctgttaattctctagtgtgattattctcctgtttcttcatctgggcatttagtgctatgaactctcctcttagcactgcttttagagcagccagtaggtttgggtatgttgtgtccgcattctcattgaattctaggaaatctttaatttctttttttatttcttcctggacccatgaattgtgcaattgggtgttacttaatttccatgagtttgtaggtttcctgtagttcttgttgttgttgaattctaattttaaagcatggtggtctgataagacatggggtgttatttcaatttttttgtacttgttgaggtttgctatgttgccaagtatgtggtcgattttagagaaagttccatttggtgctgagaagaaggtaaattgtcttgtatttggatagaatgttctatagatatctattaagtccaattgcaccataacttctatttgctcttttgtttctttgttaagtttctgtctgttgttcctgtccagtggtgagagtggggtgttgaaatctcccactataagtgtgtgcaattttatgtgtgatttgagttttagtagagtttctttcacaaacgtggatgcctttatatttggggcataaatgttcagaattgagactgaatttaaaggccaatttattggatattaggattgctactcccgcttgtttcttgggtccatttgattggaagatctttcaccaacctttaattcttaggtaccgtctgtctttgaggttgaggtgagtttcttgtatgcagcagaaggaaggattctgtcttgttatccattctgctcatctgtgtctttttataggggagttaagaccattaatgttgatggatattaatgaccattgactattgttcattcttgtttgtttttgatttggtgatggtggcaagattatgtgtgggattctatcccttttttcttttgactgttgataagatgggattatctattgcctattgtctttctggttgtagttaacttccctgggttgcagtttaccttccagtactttctgtagggctggattagtggatatgtattgtttgaatctggatttgtcatggaatatcttgttttctctatctataatgattgaaagatttgctgggtatagtagtctgggctggcatccatggtctcttagtgtaggtagaatattgatccaggaccttctggctttcagagtttccaaggaaaatcaggtgtgattttgataggtttgcctttataggttacttgacctttttcctttgtggttcataatattttctctttgttgtgtatgcttggtgttttgattattatgcggagaggtgaccttttttttttttggttcagtctatttggtgttctgtaggcttcttgtattttcattggcttgtctttctttaggttgggaaagttttcttctatgattttgttgaatatgttttctgtgcctttgagttggatttcttcaccttcttctatacctattattcttaggtttggtctcttcacggtatcccatatttcctggatattttatgatagggatttgttggacttaagattttctttggttgatgaatctatttctgctagtgtgtcttcaactcctgagattctctcttccatctcttgtattctgttggttatgcttgcatctgtagttcctgatcatttacccagcttttctatttccagcattccctcagattgtgctttcttattgtctgtatttcagtttttaggtcttgaactatttcttgtattttttggtctgttttatcttcaatttctttaagggattttctcgtgtcctctttgaggtcctctttgaggccctctgtcattttcctgaagatgtttttaaggtcattctcttctggttcatctgcatcgtgatgttgaggtcttactggtgtatggttcctagtctctggtggtgtcatattgggttttctgttgttggatgtgcttttaccttgtcctcttctcatcctttcttctggtggatgtaacaagtgtttcttgttctcctggcaggtgtgggaccatggttcccttctggtagatgaaaacagattcaatactctgatgttggtcctcttcttgtggatggaggtgtcactgttacccgggtgtcggcagtgttcgggtgtgccaggtccatccgggtcggcagttggaggcagagctgtcaccgggcctcggggtgtcagatcccgctgctgaactccatatggcaagcaggtcacttgcctcagatgactctgagcagcgacaacaagcaggagccgggaacagcccctggcctacctgggcaggcggatggaagccaggctgcctctgggtgttcggtgtttggaacccgccaccaccgaactgggtctggcacgcaggtcacttgccccagatgaccatatatagtttattcttactgcacattgctttagatatagttgaataaaaatacatttctttattttttatgcatatatttttgagactagatctcactgtgctgcctgtctgcaatggcctgaaaaccatggttctcctgttagcctcctgggaatcctaaccaggccatgtcctataggtgttcatcaccatgcctggttaagataataattctgcaggcaacagaagcagggcaggttgtcctttttctctctccttcttggggcacttggaatttgtgttctgataggacttaccaatataaactatacaggacagttttcacacaaagtgatttattttaaaaattacctttttctatactttgtcattatataattaataatacgctctatatcaaatactctttttttaacacagcccgagatcagtttgaaactataaagactattgtaatatatgattaatttgatgtgttgttgtgaaagaattgtatgtaacttaatcttatcttttaaattgtgatcatttatgattgaacaatttaactgataaggataattttgttttaaaacattattgttcaaagtataaaaattatttactacattgctggagattcaaggctcacaatattaatatatagttaactattctacatttcttacaaaggattaatgcttgatagaacatttaactgaataacatgggaaggaacttttattgactttaaatggggcactgaaaatattttattttaaatgatgtgtacgtgtgtgtattggtgggtatgtgcacatgaatgtctgcatgagacagaagaggtgtttgatcaccttgacttggaacaacagcagtggaggggcctgggacctggcaagtcaggtcatctggaagagcagtatgggccatctttctggactcatccattctatcttcatgcagccatctccataacatttcttaatgtcaagtcactggtcaccacctttctggtgtttgtctctttgctcggctcttctaggtttggcattttaaggaaactatgtgatactggtatctgatgctgtttgaaggttattttcaaagctcttgaaccagggaacttgggactcacatagaatccattagtgtctcacatgagaataggaatgtggaaatctaagagactttcattgttggccaagagcaggagacataagcatgaaaatcaagctgccctgatcctttgaaggtgacaggtcctagatatggagtaacaggaattggattaaggacagacctatattttctggggattcaggccctgcctcctcctgctcctttaaaggagatgttttctgcccttcttcaaggtagctgtctgctggcagagctgtgtagctggtaggcaagattagaatgaagtgaaaggccatgtgctgcttactctggctgccatcttacaacaaaccagctctggccagtgcatttgaagatgctccacgtgcaggcgccttgttctaaaggacaaacaagaccaggcacctgggcaggcccaggagagcaatggttttgaaattcagacttctcagtttttgggcacaaaagccacctctccccacttagttcataaagactccatccttttatgcagttaaatatttaacctccacacacagctgtgaatccctttcctatcaactatatccctagtgccttaattactttctctctttttacttcgcaccacctcaaggaagtatataacaccttttaaaggatgggagtctagaccaggagtttacagatacttgttccagagccacacaggtgataaaataaagtcagggccagtggttaaggtactccccaccaagaataatgatggagttgtttatccttgggccacaggagagaactgacttctcccacaggttgtcctcagacctccacatgaaaccacacataaaggtcatttaaaaaacaaaataaagtcatggtttaaacttgtctggagttcaaaagctcacacactactttcaaatagcactgatgtatatacagacaagcagaactgtttctacttgaaaaactagtttccaataatagttttttcatgaagtgtgagttgtgtttttgtgtcagcaatattatgttgagaaaaaatgcacatgtaaatcttttactgtcagttttactgttgtgagctctgaatcttttgtttttaattaaaagaaagtaactattatatgagccgggccttggtggtgccctcctttaataccagcactcgggaggcagaagcaggcagatctctatgagttcgaggccagcctggtctacagatcaagttccaggacagcctccaaagctacgcagagaaaccctgtcttgaaaaaacaaaacaaaacaaaacaaaaagaacaaaaaaccctaaaactatgatatgaaaacacatacagaaactcacacatatatccatttcatggcaatgtcagcttcagtatgatttgaatagatgcaatatgaaattaagtattttagttcacctcaaatgacatgaagaatgccacatttgctttaaggaagttgaacagagaggctaagggaagtaatgttggtagcatagggaagctcttccccccccatcttctaatcagtcagactgttggtgaatcacacatccctgcagctcttcacagtctgctctggatcataccatgccactcacacaggctagctatgggaaagcctttgtatggactctcgtctgtcatgaagaaatgcccctgatagaggactgagtttatttttctatttttctacccagggaacttgatactcataagctagggtgaagttccattcgtttcatgacttctgactggagaaagatgcatgaggctatgtatcacaggggaagttcttgggaggaagtgcgccttccactggctgtcctgcaaggctggctagccggtcagaatgtcaagctggttagcatgacagctccagagcacagttacaatttgtcttggctcttcagactccttaataatcattctctgcccacctctgtgtctgacctaacttccttttgatgaacatgcagaacctttcagagtgtgctaaagagcctctggtctccacctaccaaaggctaaggatgcacccaaaggccgacagctaggattcccttatttagctgtgatcctgccacctaatgtgtccaccagtgtgttctaaaagtccttgctttatgacttcatttattctgtaactatgaaaacttcatcaagctgttaccaggtgggaacatggaatttgaggtaacctaaatctgcgttccttagctatggtcagtcagatttgtctccagagtaaactgtctctttgatttaggatgagagttgtgtttctgtgtcaacaatattatgttgaaaaaatatatgtaagtgctttcactgttaattttactgttgtaaactctgggaatgttttatttttaattaaaagacagagcacatagggaaattttagttcaagacagtactttcattaaaataagaaacattgctagatggttctttatataacatagatttgggtactagtagatagagtgcctttcttagaaagaaactaagagtttaggaaatactcactctaccaagggatttgctgtaatgtgatatcattatatttgtgattttatggaggtaaaatgaatactaaatgaaacaaaattcccaaggctgactcaggaggcagctaagcacatagcatctcacatagatggttggaaggcacaattttgccccatcactgcatccgtatccttgaatggtttcgactgaagacagcatttctttgaattttcattaaacccgacgtcttgaaatatgaattccttttatgttcctgtgagttttggctaagagaaccccagtgaataaatcataccatatggcgtgtcaccagcacttgtgaatatttctgctttgttattctattctcagcagagcaccattgattatcaaactcagcggagagcattttatgatcatatatctccattagctctaagtttgactaccatagatttttctggttaagtttgcattatgtattaggaagcctatctcttcaatacaaagtttgatttcattttctaagcccagaactcttattatgtattatgtataaagattcttatcctttatatgtaaaaataggctgtactgtctttgtgtaactgaaatctatgccatcttttcttttttcttgattcacaggcagcgtattttaatatgaagatgaaactctacaatgaaatggctgtcaaggtaaatatttcttcacttgttaaacaaatgaaaagtcaattgtgccctgaattcccttttaataaaacgagcaaagcaaagtaatgcaaatttgattgctatgctaatggaaaggtggggaaagaacactagttaagaagttagctgtactaaacacagggcagcactggaaattagagtaaagtgtaaaccacaaagctataaatgcctgcgctttatgtcaggggtctctgagccatagctaaagaaaggccacaaatatcaatgaagcaatgcatcagtgtccatatgtcatgtgattgatatattatggtaaataggtgaacatggctctgaggtctaagaatcctgcttcatattataaggtaattaaaaactattcatatctttgagcagtaataaagtttgtttctggcgtagaatttttccatcatttttgtgttcactcttatgtgctgattatctaatagaacggttactttaggactgacgatatggcgtggatggcaaaatgtttgacatgcaggcatgaggagccgagttctgttcttatccctagagctcttgtaaccagctgagcatggtggtggtactttcctgtaaccccagtgctggcagggtggtgataggttggtccctaaagttcattaggcagcccacatagccaaattgacaagcttcaaatttactgagagaccttgtcgtaaaagaaagggggggggggtgcagaaaaggtgatgaaaaccccacatctgtctctagcctccatgtgagcactccactgcatactcctgtacttacaggtacacatatcacatgacacacacaaacaagctaaacatagcaaccagatgcttgaatttgatttctgcagattttggcaatgagtgcaaaaatatttattccttttatttaaaacaatgtagttataacttaattgataaattattatatgtagggatatttctgtgttgaattttattcctgattctaagacctacattgcctggttacattctctttagtatttgttcttacttctgcagagagcacattctgctttggtccaagcaaggtagtaaattctttctgaaagccatgtgccaaatgacagcacttggttagcattcctctgaatctgtgtattactcttggaaacgttgctttcttccatgtggaggctcatgggagcctgaacgaggccatctacagtaactgtgcacctttctgtttccctggagctggtgagaagccagacaagaggaagaagtggtattagctggaggcaagaactccaagtgtaggatgccctgtcctcaggagcatccacacaaggaagcactttagattttctttcttcaaggcatgcactaatctaagacatgtagggtttccattctctttgcagtgctaccatgggctcagacatggagactgtcagattcttagatgcttacttcacatcaagatgagtctctaaaggaaaaagtaataacttgttgacaacctaaaacagttttccttttctgaaaagacatggcctcacataaccttcactatgtagccaaggttgggttgaactcctgatcctcatgccctaacgtccagagtgctagcattacagatgtgatgcaccatgccccactggagagtctaatacagtcagtgtccaaagccagagctgtctctgcagtccccaggggaggcgggatgatgacagttttttccccatgctactaagacttagtaactaaagaggagcccagaagacagggatggaataatgcacacttgtagcttttacttagtcccagatcttcacaatgaattctgatcttactgaacgaggttcccttaacctcaaaaagaactatgtacgaagctcacaccggtatagccattggaaagtatccattccttcagctactaaacggataaaagtatcatccgttgtcaggtttgtctttgatatgagttggtgggcaatgttaaggttcacccttgagtctcttgatcccaggggtcaaacatgttggaaaaagtcactgtcttgcggggatgtggagaagagcttgctcatcctttccgccctgacctggaggagacacacagatgctcagtgtccagcttcttcatctggagcaagcgcccagtttcacatatccctgctgaaatctcccagcttacctctttgctctcagtggccaacgacagcaaaacatctatcaaccaacttcccatagtcgactttttcccctaggtcgctgacttggccagcatcgtctcatctccttaatgtctccccacaagagcttgctgtgggtaaagtgctgtccactgttgccaccctttgtccatcttccccacatcaggtgttctccagccttgtttacgctctccgcacacttgcaaatgtttcatccacgccgtctccctgtggtagcgcttcacctctgccaaccgctggactcatctttctcatccctgcaataatgttttgttgctgtttgtgtttttggctttattgggggaaaaaccttaggcctcgtgaataccaggagctcatgtaccttatactctgctgtgtcctcatcctctgtgtaatctgtgtgagtctcagctccccaggctgtgcttcaactctctccagccacagcatgtcttgagggactgaaagaaaaaagccttgttctctcaaaaaaaactcattacagacagtgatcttttcaaatcatgcttctccttgagaaatctggattcttcctttgcttcgtggcactggggatgaacccaaggaatgatgcaagccaggcagcattctaccctaagcgatacgatagcccctattctttctttcttagcaggacatcccaagagggaagaatagggtttgagcatggtgggaattaagtaaagagagaagatagtgtaacattacctagaggccaaatgctttactagagacactcggggttttctctaaggattactatagaaaatttatgataaaaaacatttctctacacacctcatggcacaggcctgtaatcccagtgacttgaaaagtcaaggcaggaggatcacaaatttaaggtgagcctgagtaatttagtgagattctgtcttgaaataaaaagtaaagaaacagctggggatataggtcactagaggtgtacttacatagaatgaatgaaacataggttcagtccctagtaacacacacacacacacacacacacacacacacacacacacacacacacacacacacacacacacgttgcttatggactcttagggacttttgatgagttaactttatcacaggtagaaacaaggctgacttgtgtagaggctgtgaacgatcctctgacaaaggttgattttttttttcaagatcagctgatcacagtaagcagtgaccaggattaaatttacttctaagtgagttttctataagtggcactttaaaaactttgctattcaatagtgagaggctagtggagcagagcagttgtaaaggcttatgcagccagtcctaagtaagtgttcacacttccaatgaagaacaagtgcattaatatgcttttgttctatataatagatatgaacatcctaagttgctgtctttttgaggagtcaccttttctctgcaggatttatgatccccctttccctgtagagtgatcacgctctgaatttttatttctctacttcaccatacacatgtttttctattacaactggtaacattttattattcttcctaatttacatgccagcccccaccacagctatgttacgagttccttggggcccagagacagacccttcattctttagtttcccatgcttgattgtagaaagttgttaaataaatatctcaggataatcagtcagtgctattcctcactcttgttttttccagtgcacggagttttaaaaaagaagtctttgccttaaataatttctctctgcatcactaaggactgaacacccttgttaaaagagaccctttttcttttgttggggaatgtttaagatgcttaaattccatgagtaggcactagggtagggatggactggacaacaaagtaattgattgtttcttgaagaacccattttgtcctggaacacttgaatagtgatttctcaatcagatgtcattactgagcaaagggactgggactgggagaaggccagtagactcttattttgagtgatttgccttgattttagcaccccaatcacttcagttcagattgcagtgctcacttgatggaaaaataacagcataacagcatgttgaacactaaaaatgacttaaaacaaatttgcaaagtgctataactttagtgactcattcttacagttatgaatgaatataagtcacaatatcaaatctttgttttatttttttctttcatgtctaaaacatgacgagtgtaagaaaaatatagtgactttacttaaaagtggttccatatgtcatacataaagcttcatctcagtcctttagattacctataattctatttatatttattgtgccatgcagtaagcatgatttacaataacaagtttagtgattgaaaaggcatacattgctaatttttttagaaagtggatgctgacagtttcatagcctggaaatggtgctatgtttctgtggctacagaatgaagaccacagtcttagtcacacaaagaaaggttctcccaaatttcagtgattttgtcaagataggaatggaccatgttagacaacgtccagtgtgtgtatgctcatgatgcttccattaccacacaaaggatgtctcttcactcttcacacatgcaaagcacctgaatcaattcatagagaaagcaaagttaggtagagctgcagataagtgagtgccaccatgttcccatgatgacaccaggacattgaaactggctaggacatttccaggcttccttcattttcattttagggaataaacaatagtcttttgttcctcctcggttgatatgcagattactatggattttgtggaataaagataaacataatggaggaaaatcttttctgtgcacagatggcttttgatacaccaaggttttgccatttgtttcagtgcttaatataaagattatttataagaacacttacacagtgatgttacttaatgaggaatatgcatcactggtctgactagcttaagaggtcatttagaacttgcagttaacaagctctaatctgctgagcacacaatgactttgtttaaaattatctattcagagctgatcaatgacaataattgttttattccaatcacttctgaaagttgctaattactttgaagggcatgaatactacccatttttggttttgttttatttcttttttttgtcatccattcaccttgaaattaagaaaaacaatgctgtaggatttattctggcccttgaatatgctttctttaaaaaaaaaaattgtccattcactgggactcgaattaggaacaggaaatatgctaaatcccccatgtcagttgtgctcatataagtaaggatgctgctatgcctacctacatgacctgtctatacaaatcagcgactattacactagcctccctgctgcaagagaatgtctttaaaattaaagacacactttctttctccttataatgttcacataagacaatagtgcaaaaagtatggacttcatggcaagacacacatgggtttgtgtcttgacattgccatttgctttgctttcgtaatggatagatgagcttgagtatcagtttcctcgtgttttaacatgagaccatgccttgctcacaagcagtgtctgaatggaatccattagtgtcatacttgccaaagcatgaagcacaatgaatttcagcctgtttacatccatgccagttgttttctttgcttgcccaaggctcagttccttccatgttctaaaccctcatttttcacaaagccacttaagcagtgattatttattgtgatggctagttcaatgtcaacttgacacaagctaaagtaaccagaaaaggtgggggtctcaactgagacaatgcaagcctgtagaacattttctcaaatagtgattgagggggaactcccagagtattgtggatggtgccacacataggctgttggtcctggattccacaagaaagcagaccgagcaagtcatgagagcaagccagtaagcagctcccctccatggcctctgcatcagctcctgcctccgggttcctgcatgtgtgagttcctgtcctgacttccttcagtgatgaacagtgaaatggaagtgtaaaccacataaaccctctcctccccacctgcttttagtggtggtgagattcatcacagcaattgtaaccctacctatactttagtgtggatgagttttaatttttatcttcaccgtcacttactatgtcctttaggatacaattgtgaataaaggatttgccaaatgggataggtgccaagaatatcaggatctcagaaggttctatttgagcctgtgtggatgaggttgctaccacttctagtacttgctagaggtggaaaaagaaggatccaggtcattagtgtccccttcacccctcaggaatccctttcaaggttagcacaggtgactcggcagatttgtgtttgtcctcacaggctgcctttgtccaaaatggaagatgtgagcctgtttgcatgtattatttatatatgtgtattctgattggtctttctgtgtcattagaaagtggtttgtgcctattccaccatagtgtcagacagtacataattttggtcaaattatggagactttctaaattgaatatcatatcattatataacaatctttttcaattaaagaaccgatctctaaaatgtgaccacctgaagagtgtgagaggccactcagtagctgagagctcttgcttctcttccagaggaagtttggccctgagcaccccaccccaggtcaggtggccacacctgcatgcagctgcagccctccggcttctggcttctataggcactgcaatcagctgcagctctcccagagttaaaataattaactaaagataaaaaagtgaatgaacacaacttgaaaaacattttattgacaagttctcaatgtagctacatctacattgcttcattcaggtttctagaatctatgcctcttgtccagtacactcaagattggtgtagctgttttgtttatttttagtcattttttcccaaatgacagcctgattaaaatattaaaatccccacagataccagactgtaaaatgattgtgaaaagcttttaaatgacaaacatacttccagacagcatcactgttcattcagtaccaattcaacattccacctacatatatgttaggcttaatatcctttagctgcaaaacaaaacaaaaatatcattggaagactaacaattattctcaatgtctccttccattcttttttattattattattagttctagttaaggaacaagcttatttcaaggaacaagcttatttcaagtcccttctccctctccctcccctcacccccaaccctcctcccccacccccagcccacccccaccccatccacccaccactccccaggcagggtagggccctcaacgggggctctgcaaagtccaccaagtcttcctatgctggtcctgggcccttccccatgtgtccagggccagagtgtaacccttcatgtgggatgggctctcaaagtcccttcttgcaccagggaaaaatactaatccaccaccagaggctccctggagtgcagaggcctccttattgacatccatgttcaggggtctggatcagtcttgtacgggcctccctgacagcatctggggttgatgtgctctcccttgttcaggtcaactgttcctgtgggtttctccaacctgatacagaccccttcgttcttcattcctccctctcttcaactaaattcccgatttcggctcagtgtatatctgtggatgtctgtctctgcttccttcagccactgggtgagggctctaggatggcataaagagaagtcatcaatctcattttaggggaaaggcttttgggttatcctctccatcattgcctggattgtcagatcgtgtcatccttgtaggtctgtggagatctccctggttccagatcttttctcggacctatagtggctccctctgatatggtatctctcatcctgttctctttcctctattcttcccccaactcaatgtttctgcccctccatttcctctcctcgtctcctcttctcttgctcttactgtagcagctccttccccccctaccctcatgcccccaattagttcgggagttcatgccacttccattcctggggaccatttatcccttagagtcctagtttctttggtgaagagcattatagactggtaatcctttgctctatgtctaaaattcatatatcagtgagtacataccatgtttgtctttttgtgactgggttacctcacccaggatggtttcctctagttccatccatttgcctgcgaatttcaagattccattgcttttttctgctgagtagtactccattgtataaatgtaccacattttctcaatccattcttcagttgaggggcatctaggttgcttccaggttctggctattacaaacaatgctgctatgaacatggttgaacatatgtccttgttgtatgtacatgccatatttgggtatatacccaagagagaaatggctggatcttgaggtagactgattcccatttttctgagcaaccaccatactgatttccagagtggtcttacaagttcgcactcccaccagcagtggaggagtgttcctttttctccacatcctctccaacatagattgtcattgctattttttattttagccattctgacaggcatgaggtggtatcattttgagttgttgttttgagttgcatttctctgatggccaaggattttgagcactttcctaagtgtctttcagccatttcagattcctctgttgagaattccctatttagttctgcaccccactttttaatttcattgtttggtgttttggtggctagcttcttgagctccttatatattttggaaatcagtcctctgtcagatgtgggatcggtgaagatcttttcccattctgtgggtggtcgttttgtcctactgactgtttcctttgccttgcagaagcttctcagtttcaggaggtcccatttattaattgcagacctcagtgtctgtgctactggcgtaatgttcaggaagtggtctcctgtgccaatttgttcaagggtaattcccactttctcttctagaagattcagtgtggctggatttatgctgagatcattgatccatttgcacttaagttttgtgcatggtgacaggtatgggtctatctgaaattttctgcatgtccgaatccaattgtaccagcaccatttgttgaagatgctatcttttttccattgtatagatttagcacctttgtcaaaaataaggtatccataggtgtgtgggtcaatatcagggttttcaattcgattccattggtctatcagtctatttttgtgccaataccaagctgttttcagaactatggctctatagtagagcttgaagtcggggatggtgatgcctccagaagatcctttattgtaaagagttgttttggctatcctgggctttttatttttccatataaagttgagtattgttctttcaatgtctgtgaaaaactgtgttgggattttgatggggattgcattgaatctgtagattgcttttggcaggattgccatttttactatgttaattctacctatccaagagcatgggagatctttccattttctggtatcttctttaatttctttctttaaagtctcaaagttcttattgtacagatctttcacttttttggttagtgttaccccaagatattttatgttgcttgtggatattgtgaaaggtgatgtttccctgatttctttctcattggatttatcatctgtatatagtagggttactgatttttttgagttaattttgtaacctgctaccttgctgaaggtgtttatcaaagtggacagccttgtcttgttcctgattttagaagaaacgctttgagtttctctccatttactttgatgttggctattggtttggtgtatattgcgtttatcatgtttagatatgttcctgttattcctgttctctccaagatctttatcatgaagggatgttggattttgtcaaaggctttttcagcatctagtgagatgatcatgtgttttttctttttcagtttgtttatatagtggatcacattgatggatttttgtatgttgaaccatccttgcatccctgggatgaagcctacttgatcatggtggatgatttttctcatatgttcttggattcggttggccaatattttattgagtattttaccatcgatgttcatgagggatatcggtctgtagttctctttcttagtcataactttgtgtggcttgggtatcaaagtgattgtaacctcgtagaaagagtttggcaatatcccatctgcttctattgtgcggaacagtttgaggagtactggaattagctcttgtttgaatttctggtagaattctacagtgaagccatctggccctgggcttttttttggttgggaggcttttgattactgtttctatctcattaggggttataggtcgatttaaactgtttatctgatcttgatttaattttggtaggtgatatttatccagaaagctgtccatttcctttagattttccaattttgtggaatacagattttcaaagtatgacctaaagattctctggacttcctcagtgtccgttgttatatctccctttcatttctgattttgttaaatagcatgctctctctctgccttttggttagcttggctagaggtttgtctatcttgttgatcttctcaaagaaccaactctttgtttcattgattctttgtactcttttcctagtttctactttgttgatttcggctatcaggttgattatttcctggtgtctactcttccttggtgtgtttgcttctttttgctctaaagctttcagttgttctgtcaattctctaatgtgacttttctccagtttcttcatgtgggcacttagtgctatgaacttccctcttagcactgctttcagggtgtcccataagttcgggtatgttgtgtctacattctcattaaattctaggaagtctttaatttctttttttatttcttcctcaacccaggaatggtgcaattgggtgttattcattttccacgcaaatgtaggttttctgcaattcgtattgctgttgaattctagctttaatgcatggtggtctgataagatacagggggttatttcaatacttttgtaacttccttccattcttttaaataagttcagacattctttttggccacaaaattgatatcatactttacattttagtttgaatagtcctgatagctggtgaaaatattactgaaggatgaaaggcctcatgatgacagcctggagctgactgaagtgaggcattgtacatccccagcacttctcagaaaagtgaagttacatcttttggtaaaaataaactgtttggatttctgtagaagatatttgaagaagatagcgtcagaagaagtttcatgggttgagaatagtaattagtttattttccaatgttgtttgtaatgactagaagaatagattcgccactgctccagcatagttactagatccatcactgatagctgaaaaattataagaaaaatacataacctgtttttgtgtcattttctacgaatgagataaagatagtatttttcacatagaagtgttctgaaaataaacaacataaacaacccacttagaatcccacctgacacctgaaaagtcaacaaatagttgctattaatattattaaaatagcattaaaaagtcatgatcaagactcagtacagtagcaggcatagtttctggtacctctcagcccagcacttgggaaactaaggggagagtgtaaactcaaagacagcctgacttctatagtgagtctcaggccagccagcggggctgctagagaagtgttatgcagagtgcaaagtaagtaaatgcaacaccagctatcaaggttttccagtttggtgatactagcaatttgaactcagggccttgtgaatatatataacaacaactagagaaaagacaatgaatttcaaagaggacaggattggtgggtgggggagagaaagggaaacaacataattacaatacccaaaaaacccctgtctcaaaaaacaaaaacaacaaaaaattataataccaaaaataaaaagtaaaagaacaaaaatagcattttatctaaagactgttacgataaatctttccgccaaaggccaccgagccccattgccacttgtgagctttatgccagccgtccgcctgagttagggcccaaatgaatacacacaaacttgtattaggtacaatgctgcttggccaatgactaggattctcatctgttagctcagtcttaactatcataaacttgtatattttataagacttatcttatcggacgccttattggcgtccctccttgtcggtggctcacattgtgccactggagcaggaacagaggggaaaagagacgcttcctgtttctccttcacttaaatatgagtctccttgctatgttattttctgcctggatcaccacgtctctactacatttcccagaatcctctttgactcctagttccgtctaacttgctgtctcattggccaaacagtattttatttaacaatcaataagataaacatacacagtacattccccatcaaaagacaggctcatttatcagtttacttcaattaggccttatccaagctacagtacagttagttgtattagttgtgtgttctgtagctgtgaccaaagaactaagaaagctacttcacaggcaggaagagggtcagtgggtacagagcctctatagaagcttggggatggggcttgggagcctgagtagctacataagagtggtgggaatggtggcctacccctacaatcccaaccaatgtgctagctatattcatagaaaacccaaagacactcttgtgttttttattatttgagagtttcaattattatttttaaaatgtattttgatcatatgctttcccttccctaaattcctcctaaatcatcctcacctcaaaaaaagaaagaaaatcaaaacattcaatttttaaaaaagaaaatcaataaaacaacaacaaaatggaaggaagaacacaaaaccccgtggaatccattttgtattggccaactactcctgggtgtgggaactgccctccaggaagcttgataaacccagtgacactctattggagaaactaaatttccctcactgggaagttatcaattgcagatagttagagatggggctctgtgtccacttccaattctcagtgctgggattttgtctgctttgaccatgttcagcgtgtgctgtcagtatctctgagttcatttgtggactactgtgtcctactgtgtctagaagctgctgtttccttgcactcatccacctcctctggctcttaaaatctttttacctccacttctacatagatttctgagcatggaggagacagatttgaaaatgacatcccttttaaggctgaatgctccaaagtctgtcactctctacacattatccagttgtgggtctctgtatttccatctactgcaagaagactctttcatgagtgtctagtgaggcactggtctataggtgtgacagtgtgtcattaggaattattctatgttgggttcctttggcagggtaatagtaataggttttcccctaatgctcatgacctatctagtctcatgttctttgctactttatcaatgtctgatacaggttccgtctcatggagtgggtcttaaattcaatcgaaatgttggttaatcctattgcatctgtgccactatttcaccagtatatcttacaggcatgtctctgttgtaagttgcaaggcttgtagctgggtgctagtgatggttacttttttcctagagcagtgtgcagagaaacttccagcatcatgaatgctagtcactgggtgaagcttttagttgaataccagcttgacttctctctgttcaatgacataaatactgtcttcagcactaaggccttaccatcaggttttagagaataaccaaatagccctggaaatagcctgtgatatttgagaggggtgggccatgcgacctcattggccaatgcctcaacaatatgtaacccattcctggcactagaggttttactggttgcataagatgtctacttggggcattgtccaaacctttatctgacagaagttattagacataagagtcttgatttgaagacatacatatattttttaaatgttcaatggaatattttatctttttattttcactaatagattcagagacgatggcgtggctataggatccggaaatactgctttaattattattatttaaaggaatacttgaaagctgtttcagagaccaatgatgcaattaggtgagtaatataaataactactcatgtactagtgaaagtttacatggactattaatagtaattattatcactcttagagaagcccatgagacctagtgatactgtgttgacaagatatagctacatgactctgtttaccttaaacatttattgcccacatgttaaagttatcatgcattactgactgcaaattaaattatttatgtgtgtagtatgtggtcacacaagagtttactttctataaaaatatcacataatgggttagatttatctgtgaaatgattctgcagatgcagtcttcagtaaccctcacatgtattgggataagcaaggacaataatgagaatttgcttctgaaggaggaaaatatcatggaccacattaaggggagcagcctgacacctaacagcacttttgagcatctacttagatagaagctggctttaaggcaccagaacacctgtagatagacacaaagtgcgggagtcatgcgctgttccgtcaacatgcccagagttctgtgtgctttcatgttgctgtgctttgaaagccgtctccttctgtgatacacctcactgtagtgacagggtgaacatatgcctacagcacctatgaatggggaagaaatgaccgttaatggttattggcacctacagagtttttacttgcaaattttgtttcttctacagtcattatttcattttactcctaagtatttttggaccaaagataacaagcagctggtttaaggttctagctttaaggtgtatcttccttcctgagggcctctcttggtacaaatctgtgattttaaatcggttaagatatttaaagcagacttcagtgctgcactcctaaaattattttctgtagtattgccaaagatccagttttgcctagggggaggtccctaaaagattcccagatctcttcaggctgctggcaacattcgtgtctctgctctcctggcctgtgggtgacagtatcattttttcttgttagctttctggaatgtaattcctgttggatatctaaatgtttcattgtttttggtaagttttaaagagctttgcattacaaaatctgcaggagaattgatggacttcaaatgtataatattaaatgaggccacataatctcagaaagaagaaaattacattcttcctcatacggggaacccagccaatgatatatggtgtgtgtaagcaaacgtgcatgtgagtacagtatagcatgcagaacaattcaggctaaataatcaagggatgaggaaggactgagccaagtaatggatttgagttctcatgttgatatgacattcccttaagttccttcttataaatttgtgcaccttgattttaagattgttaaaaattaaataactgtggcctagggagacagttcagtcaataaacttgctatataggcttcaaggctagggttcagatgtccagaaaccaataaaagccaggcactatgctgagtatctgaaagcctacactggggaagaagatggaggcaagcagacctctagacttctttgtcgtccaatctcgccaacggtgagtctgcctgttatgtcacttactgcctggatcacaagacttctttttactacatttcccagaatcatcctggactcttagtcccgcctaacttgctcccctattggccaaacagtgcttttatttgtcaaccaataagataaacacatccacagaagaacttcccccatcatctcctctttttctgtctaaataaaaagaagggtaacttatattttataataactaaagaaaactataaccataactaactgtcttcaactcttatcaaagaccacagaaggataatatataaactctagaattgacagagacatcttgctacctggacagtcacccaaagttcctctgtaacgttggggcatccatcttcagcccataggccacagtgtgtctggcacacttctccatttcaacaggaacccttcagtactgtcttgtttcgtaagttcagcaatcactttcttgtgggtcctgcttgttcagtttatacagcaacaaacagtccaggcaagagcagtttcttgcccaaatggctaatctttcgatgttgaaggcaaccactgtaacgagtttcttcaatgcccatctttctttctgacataattggtgtgcctggagcagttgtgtctcactgtcaagaaaaaccctaaaccatttaaatgccatatatactgtagtctttgaaaggtttaaagaatatctatccatctcaaatacatctctgtatatctagaaaaggtaactaacctaactgtagtttgtaactattataggtgactatataatctgtatttgattatgcatatcacaaaattgaccttaatttgtgtcaataaatggaaatccataccaatgtaaagtattcatctccatatcctactcccctttttttcctttaaaaagagattgactgtgatcattaccatttataacaaccccatttaaatgaaaacaaacatttataaacaatatttgggaatttgggcgttgttcattccaaatttcttcctgctatttgggggcaatgtccatatcatggggatcatgataaaacatggaaatctggctgtagtcatctatggctgcatcatctcagctgttttggatgtaggatcagttgggccactgcttcatgggtcttgcttgatcaaaccatattagtctggaagaacccacagcttttcattttctgtgaaaacacaagcaagaaatcttttcccaagtagcctgtccttagacttaaattttgaagtcaaagcatttttaaaatgtataagttggatttttttcagcagcattgataatcaaatgtattgtagctctttcctcagcaatcaaacaattttaaaggagcttcaagcctctgcttctttgtggcaaacagagaccacccgagaaaatgctgcgaccaagaagtcatgcttgtctctgttcttttgcttctaaaatccgttttaaagcttttgtgaagtttttaagtggaagtttgtaaacccacatcctgacaccattctgtaacgataaatctttattccatccacccgagccccgaggccacatgggagcccagaataacacagagtcttatgttagttagtcttatgttagtttacaatgctgttggtcagttgactaggatttcttatatgctagcgtagtcttagttatcataaatctatatattttataagacttatcttatccaggacgccttccactggtgtcctcttcctgggaatcacatggaggctccagatcagagagcaggagcaagagcaagaggaagagagccaggttgctgttttttaaaacatttatttcattttgtatctctctctctctctctctctctctctctctctctctctctgtgtgtgtgtgtgtgtgtgtgtgtgtgcgcgcgcgcgcgtgcgcacacacacagacacacacatatacacacacacaaactcatatacacatgagtgcctgcaaagtccagaagtgtcagatcccttgagctagagtaacagacagtacgagctgcctactatgggctctgggcaagagtcgcaggcactctttaccagtgagccatcttcccacccccagtttgtcatgttttaaacacagaatagtgcagttgaacttccctgaaaagctgctgatgccatctcccctttggttttgtgttgtgaaagccacatgaggacaggggtcaacattgctgccttcagtgtctttgtaaccttgtagactagcatagtctggaggtaatataagctgcctaagttcctaacatgatacatagtgaaaccatggtatatttttaagtttgtcagctagaggcagttttaagaatatcatttttgttttgtttttgaatctttgttaccaattccattcaataaacacttgttgacttttatacaggcctagtgctcgcttagatgctgggatacaatgatttaaatgagaaactcttgttagccttaactacacatgccttataggaacatatcacgaaaacatatagaaacaaaagcagaaagtgtttgtgttttctatgcccaagaaatatactgagtttttagaattatcacaaacttttataacacagtgtcctccaaatgtgactttgtgagctgactgtcttctcacagactccctgtgccttccggctctgcagtagctttgctaacttcctccgtctatggtgtcccttgagtgtctgagtcctctctgcaccaagcgcatttttctgctgccctctgctttgttccctgcttgctcttcctcctccttccatctcagcagaaaagatgaatggcttaattttataggaaactggagatagaaaaccactgcgaagtttggattcgtttatttgtagttttggttaagtactggtgatggagaaattctcattctctctttgccacacctagttcagtgttaaaatttatgtctactaagaaagactaaagcaaagaccaggcatatgcacatgtggctttagttatgagccaggttgccctaactggaagtgaactatgcccgggatggggattgctcaggagcccaggcatctgagggtggcccatccttatcctcacctgaaactccctgaggaaattctaatccttggggtctctattacagtaatggattggtgggggcaaaatgatgatgacagattaatgtctacactattaacataatacagtgattgacacatttccccatagctctttgttctgtaagactactcaggttactgcttttccagatttctctttcttgattcccccagccccatacagccttttcttattcttcaggctttgttgtttgtcccatctttcctcttatttccaggttcctcttgcagctccagtgttccagcttagctaactttcaagttccacttgggctattcactaaaatatgtcattttttttttgtaatagcatctccatgcattattgtcctgattttccttagctaaaaaacccttccatgttttcctaaatcaaaggatattatactcaagtgatgaataatgacgctgttctcagatgtaaaagcaacatgagcatgcctaataccgcacatgaaatgcacaaatcgttcctccctccatccctaaaacctctaggtatctcttattaagtaggcacaatctagtttaatgtgtttcactctagaggaatcaagttacataagcatgtatgtgtatgtccatcggtttttgaaaaaaatttacatcgtcaagattaatccttgacttatttttgtactttgagtattattccaaacttaaggaatgatcttctattaatggctgtttggtattataattcataatcttttcaacagaccctctgtgacagatacaattttttttctgctgttatgaagacagagctatagaaagcattcttcagtgtgtcttggttttccacagcccttctttcttgggtagaaacattagggtatatagttatcagattcttcaaaaacttctataaggaatttgactgattgaaatattaataatacatcagattatatatgtatatatgtttgtattgtatacataatctgtactgtatttgtggttaaatgaacctctcatttagccttcatttaaaatcttaatatttaagtaaactgctaaaacattatctgctaaaaaggcaacacactcataataaatatgattcatataaaaaagaaatgtttgcatttgctttaatgttgtatccaggtgtccttttgcttctctgtaaatgagaccttcttcaagttattataacattttatttattgagagagagaaagacataggtggggtggggatctgtaatgagaggttctggcccatctggtcccatagccattgagccccaaagaaacacatggacggcatattaattataaaattgttgaccagtgactagggcttcttattggctagctctgtcttaattattaacccatttctatcaatgtatgtattgccatgaggctacggcttaccgggtaatgtcccggcacattgttgctcttttggcagcatcttgactctgtctagcagactcacttggcccacctttcccagaattctcctcatctcctagtcccacctatcttcatgcctcattggccaaacagtgttttatttatcaaccaatgagagaatcatatacagaaggacacccccattaggggtcagtgtcggggagtgcacacatgccatggtggtgctgttggggcagtcagaggacatctttgtgtacttggttctctttccactcttaccgaatctgggcattgatcttggtcaatgaacttttgcagcagtcacctttgtatgctgagcagtcttgccagccccaaaagagaatgtcccgagtttccatatttaactataattggtgtatggaaatgttatctgtggagctggtgagatggctcagtgggtaaaagtgcttgctgctaatcctgatagcccaagttcaatctctggaagctacatgaaggtagaaggagagaaggaactccacatacttatcttatgttgtgtgtgcgcgcgtgtgaggttgtttatcttcttccaaacttattttttctgtgtcccacagcattaggtagagtctttgcccagtgctgactaagatggggtgggcatatcatgttggtcttcatttgagaagggaaacatggccttttgcaaaaacaaacaataattgttgaaaagtgttagttctcaaatgcaaaaacttcatgaatttaatgaacatttcagatgatctgcacatactttggatatttttcaactaccttttctgaatttattgtgattgttgatttcccttttatttaaaatagcaaatttaagtcacatttacaatataagcgagtatgttgccagtatactaattgagacatgcagaaatcaattcccacaatggttggcatggcagactgttagttctacagacgtctactctgaggttgttttgttctttggtcagttcctaaaatattaaaggttttatttaattttgatgaataatcaagtcatctgcatttattttttgtaatgatgttctctgttctatatgattttgcattaaccatacaacattccctttaaaactatttgtagcttgtattattttatagccttttgttctatacatttctgcattgctgtattttaaatatatctctttacaaatatcattaggagtttttgtttgtttgagacaaggtcctgcaactcactgtgtagaccatactgccctaaaactcactgagattcacctttttctgcctcctgagttctgggattgataatgtgtgctaccatacccaacactaattaggatatttctattttaattttgtgtctttgcaaatgtcttttttcattatgcatttggttttgagacaggtcttgccatgcagctgaggttggcctcgaactcttagcagctcccagctcagtctcccaagtgctagagccacacccgtgcaccacctcacccctagtaagatttttataataaacttcagttgtctgtactccatcatcaacaagattgcattcattgataatatattaccaaaactagaaactggtgcctatcacttgctgatgcagtccttgacagtaggttttcacaacgtgctgttaagtgatggtgaactgcacatgactgatgcccatcctcactcagtgtgtgtttgggcgacttccttcatgcttctttctcagccattcttatctgctgctctcttatattccttcctttctgtggtttctcctcctctctcatcttttgtattgatttcttttttaccccatgtctttccactccatagacttaggaaataagacttctactttcattccttatgtgattaactttgaaatttcatccttaacaaactccaaagttaatcaatactcctctttcaaataacacaaacattattggaggggactggagaatgttttgatttccatgcccatatagttcaatatttcagtcctgtctcttataactctataaattaggcattgtttttcctacttcctatgaaaatgccaggtttttgtttgatcccttcttacactctatctcattactgggattattcctttctccctgaaacattatctttataaatcactagacaagatacaagatgatatcattaagtttttgaagtgaagttacaacttaatttgaactcaggaaagctacttttaacatacatgtttctaatttaacagttatttttctgaacactttgaataaatgatttccctgttctctgttttgtttcacttgttcttcattgatccctattgaccatctctctgtctctgcatatttatctgcatgggctatccgtcttagaatggaaactgtctactgattttttcttttttaatttttaaaaaattttatgtacactggtattttgccagcttatatgtctgggtgagggtgttgggtcctcactggagacacaaacagctgtgagccaccatgtgggttttggaaattgaactcaggtcctctggtagagaaatcagagcttttaaccgcttagtcatctttcaagttcccctactgatttttctttatgtggaattgaacttccaatatttagacaggcataaacttcgcaaatttttcaatgtatttgttttcactttcaaccccctttcctcattcaggccctcccagctaccctccctcaaagccctccagtgcagccaagtctatagcatttttctctgactattggtgtgagtgtgcatgtgtgtgcacatgcatgcacacgtgtatgtatgtatgtgtacatttgctcagtcttttttttttggtggtgatgtgtatatggttgcaatatggaccattctatactggacaatcatgaaggggggtcatctttgagaggttaattcttctcctaccagtcattatttcctatggttatttcatagaggtgggacccctgaaatttacccttgtccatattagcatgtccattaatactgccattacagccatttctaggaagtactatttcacagcagagttcctggtattctggatcttaccatttttctacccacttttcttcaatgtttcctgaaccatagagtcaggagccttgatacagatgaatccattgggactgggcttcccgtgattcactaatctctacattgtgtccaattgtggttttctgtgacagtctccgtttgctgtaaaaaggggctttcttggatgagggatgatagacatatttgcctgtgggtataaggaccagatttaggatgtaggtaagattgtgctggtcttctaaactgatggtagccagttctctactatgatcatgaaggtactagctccaggaagctggccaagttttctgtaccaggcaagctttccctcctgtttgatgagccttaagtccatcagacagaagttggtaaccaccagcatgtgagggtcacttacttcacctctgcagataccttgccatgctgttcattattgtgttcatgggggtcacagctggatgggactatttcttctttccctcccttggcgcttgcactgtatttctggtaccattttctagacagtaaagaggccttcaggttagattcagtttggagactccaggtctgcagcaatagaaggtgtcttcagccttcagaaggcaaccgagggcagcagcaatagcctcatcaactattcaaaagaggtttctcatgcttagtactttgctttttattagtctgtggttcttaagtggagcattagcattgtcagtccaagtggcagaactttgtcacattcattgtgtataattttgtaaatacaaaataaagtgatttcttgaggcattatcaaattaccttgttatttctctttctccatttcttttttacttcccctccctctttttccgtttcctctttcacaccacctgtaccctgccattcccctcttaagcactcttctccacatggtccacattcctaaagtgaccccatgtcatatactcacattctaaaacatggagcttagaaccacacatgagaaaacatgaggcagttgtctttctgggtttgcgttaccccacttaatataatctgtcctttgtccatttatctgcaaatttcatgatttctttctctttttcctactgaatagtgtcccattgtgtatgtgtgtcacatttccactctccattcatcagctgagggacatttaggttgttttcatttcctggctattgcaaatagggcaatagtgaacattgctaagcaaatatccatgtaagagaatgtcgaagacataatagagcagtatagtatatatggaagattgatttttagttttttgagagttctctgcactgatttccatagtggctgcaagtttgcaatcctactgccagtaagtgtgggctctactctccctataaccttggcagcattgttgtccattcttttgctgatcttagcaattctcactggagtgagatgaaatctcaaaagttgttttaatttacatttccctaattgctaacattgctaaacacttttttgagacatttcttagccatttttatttcctctattgagtatgctctgattaattttgtcatgtttttccttgactgttactcgagttctttgtatatttgtcatattgatcccctgtcagatatatagctgacaaagtttctgttccattctttgtcttcacttggtggtttccttccctctccagaagcttttcagtctatgggtcccagttgttaatggctggccttaattcctggaaaagggagtcctattcagaaagtccttcccactgcccatgttgtcttctaacagctttcacgttgaggattttggtccatttggatgtaactttgcacagggtgacacataggggtctagtttattctgcttcacatggattcatttccctagcaccattggttaaagctgctgccttttctccagtgtatttttttttttttttttgcctctctgtccagtgtcaggtggctgtgggtacaagtgctcatgtttggctctccattttatctcattggtctacatgtctgtttttgtgccatatttttattactatagttctatactatatcttgaaatcttcaatggcaatcccccctattatttatttatttagctcaggattgcataagctatagttccatatgaattgtaggattttttctgtttctgtgatgaatgttttttggtattttgattgggatagcatttaatatctaaattgcttttggtataacgattattttcacaacattaattcttcaaatccatgaacttaggaggtgactttccattttctagtgtcttaataatttttgttttgagagttttaaagttctcattatagtagtcctaggtcatcttatgtttatttcacaatattttgttgtctttcatacagttgtaaatgggagtcccatgtctgtttctcagtttgtttattgttggtatatagataggctactgatctttgtaagttgattttgtatcccactacttggatgaaattgttgtttctagaagtcttctggtggaaatattttgggatttcctatgtataatatcatatgatctgcaaataaggacaatttgtcttcttctttttctatttgtattctttaattttccctctcttgccatattgcttcagctaatgttaccagcactgtagtgcaaaggaataggacaatggatatccctgtcttcttcctgattttagtgtgattactttgaaagattctccatttagtgtaattctggttatgtgtttgtcatatacagcctttcttatattggggtatgttaccttcagtcctactctctctaggacttctattacataagtatgttggatttctccaagtatattctatgcatctattgagataattttttgtctttaaatgcatttatatgatttgttatatttttattttatttgctgactgttgaaccatcgctgcattttgggaataagtcaacttgattgtggtgaatgaacttattgatatgtccctgtatttagtttgctagtgttttattgaggatttctgcatctatgttgatggagtacaggtttttaaactttcttgtaaaacacagacagatggattttttttaaatctattcaggtagctcatgtctttttattggaaaattgaggacacaagcatttaaaattattattgaaatgtattgtagattcaactcttgtgtgtgtgtgtgtgtgtgtgtgtgtgtgtgtgtgtgtgtgtttgtgtgtgtgtgtttgtgtgtgtgtgtgtgtttcctgatttgtgttcttagttgtgttttgtatttcattcaattttagcttggtttgctttctttctagaatctcgtgtctgtgcttcttttcttcagcttggagtattgcatctagtattccattcagtatattttagtttattggatatgaattattttaggatgtttgtgtatcatctagagatcatctagagtttttctttctccttccagtctggcagacagttttgtcagatactatagtcaagtctggcagacagttttgtcgggtactatagtcaagtctggcagacagttttgtcgggtactgtagtcaagtctggcatacagttttgttgggtactatagtcaagtctggcagacagttttgtcgggtactatagtcaagtctggcagacagttttgttgggtactctagtcaagtctggcaggcagttttgtcgggtactatagtcaagtctggcagacagttttgtcgggtactctagtcaagtctggcaggcagttttgttgggtactctagtcgaggttggcagttgtgggcttttggatctggtgcacatttgctctaggctctcctggctttcagaggttcttctaaggcactggctgttattctgagggtttccttaacgtatgacttggtttttctcttgaagccttcagcatgcttttgttctgtatacttagtgttttaactatgatatgctgtatggtattattttctggcctttctagttgggggtgctgtgtgctgctggtatgtatgtagttatgtcttttcttagtttgggggaaattttcttctcttagattcttctccctcatctgtgcctataattagaacatttgatcttttggccatgccacccatttcctgcgtgttccttttctatgttttaattttgttcatattctttgattgtttgattagatcttctactttagagttgtttccattttagagttttggggttgtttcagtgaaagttctctcgggaagctgcagtcaggctgacagcaggagctgctgtctgtgtgaaagctgcagttaaaggccagctccatttcaccctcatctacaggtggtccctaaggcctttggctgttagccactgatgccccttagtttcttgttacatagagctctgcaaagcagtttataatgtggaaattttctgcctctgagcaagaaagcaaggatcaagatagcagccaagatggaagccatatctataacctcatacccagagtgccacaccatcgcttccattgtatcctttgaaacagaaaatatggtccaccctataaccaaaggaagggagtggcacaaagactgagttcgactaaattccacagtgtcattactggaggcagtcttggacaagtcacacactcaacaacttagatatagcattcagtagagctattgattttaagtgttttccctagtgtaaaagttactttttatacttaagacaatattttaatggcattattattattagatttcaaattttagtattatctctaaagcaattgtgatttatgctaattacttataccagtaattattaaaatttatgtctggttttttgaagagtatatgaaggatctaatatagtcctttgcctttaggcaatattatatcatttagagaaaatggtagtaaattattttacatcagaatatgccttgattttgaattgtgtaggacaccaaataatattgggtttaacattgttcttttttgtaaaataatagttgatatattctatagttaaaaataaaatatgtaataaatattcaaggatacattttcttaaccaagagtagaaacattacaaagataaatggaactgattaatttaaggctgagtttgtacttggtagacatgctcctttataacctctagcctgagatgtaaaaactgccccaggttatgaataataaaattatatgatgaaatttaaaattgttataaataaaacattattagcttggagtacagaaaactggcagtttttaagtcttttgacagaaatctaaggttaagacaatgtattcttctaagttgaacacaagaatggaaatactgactgttaatatcttatagtagtatctctattttgaatgttaattggccagtcatcaaaatgaattagtttctcagaattaattttgtatggtgtgatttggtgagaaagaatttttgtagatgatattagactttatattttcatacatcaggaaagtttgtaaggacatattttgtttttattgtactagctttaataatataacattctcataaagcaattttaaggttactattttgtaatatgttcacatagtcacagctctgcaacatcactatagtcatttaagacattatcatcaccttgaataaaaactgtactctgtagcagtctcatcccattccttacccttcagctctacacaaccatgaatctactttctatctctgggtttgctagtctggaccttgtatataaattgaacattgtagaaagtcatctttatgatatcctttcctgtgctgtattcaaagttcatccatgttatagtatatggcaacactgtatcccttggcattgccaaatactccattccatggataagctgtaacattttactcattgatctgataatagacttttcagttgttcctactttttcagctattaatgaacaatggtgtgataactttacgtataagtttttatgtggacatgtttttgttcttgttagatacatcagcaaatcttgaagctgatagttaagaaaataaaacacaacactatcagtacagtttttaaacatccatgtgtatgagttttgcctgtgtttatgtctgtgcaccatgttgtggatgaagtgctcatggaggccaaaagatgccaggtcctctaggtttgagttacagatgattgtcagctgccatgtgggtgctgagaactgaacctggctcttttgcaagagcagccagttctcttaacccctttccagttccactagtagggatttaggggcttggtgatcatgaagagtggccagattggaaaatagatgtctcttcatatacattaaaagtcattatttaaaagcaaatgaaaaatgaagactaaagaaagacttgaggtcaaaataaaaagtagatttccagtaagtaaaactctacaatactaggctgtcttgtggggcacagaatatacctacatcaacagacattatctttaactcatcaaaattcaggtagaggcagctccacttttcaatgagaaatgagatttccagtgcactgtcaagtctgaggagctttgcttaataaggtaatgaatgattttagaagacatggaaagtctgttgtactggctggtttcatgtgtcaacttgacacaagctccagtcatcagagaggaaggagcctcagctgaggaaatgcctccatgagatccagctgtaaggcattttctcaattagtgatcaatggtggagggcccagcccatggtgggaagtgccatccctggcctggtggtcctgagttctataagcaaaccaggggaaacaagccagtaaaacagcaaccctcattggtctctgtatcaactcctgcctccaggttcctgccttgcttgagttcctggcctgacttcctccaatgatagactatgatcaggaagtgtaagccaaataaaccctttcctccccaatttgctttttggtcacggtgtttcattgcagcaatagaaaccctaaataaaacatctgtatatttatatactataaaatttgaaacactttgaattatatagacatacaagaaaattactctgtaatatgtaaggtaggaatttatagttaaatgtatattatatactcatatcatggtaagcataaatactgaaatacttataaatcaatatcttacctccccctatacatacaatattatgtgcttaaaacctttaattaacaataaaaatgttctagactaactgctaagaaattttgaaagatctttacaaaaatatcttttttcttgctgaagcatgaaggttgttttgtattgccgtagatatggaaggtcatctctgaggtgacaatgtttccacaaatcccttcatatgtctttcagacttttgggagtgactggtggctttattatccacatgaacatcctaccaatgtcaatattatatcaaagacttcctagattcacgggcatgctttcaaagatgccaacaggcactgtgtatgaaaatgcacagtcagctttttcatgatgaggttagcacttacggaatactacacagatccctgggcagctctgttgtgttggcatgaattaggctccctggattgctctgaaacccatacatcaatatgcttagcatggcatgtgagaagtgatttaatgtttgatgcctgttattttcctatgaacaatttctggttgtacacttagctttagaaattgtttcccctctctgttttctctattactctgtcaatgctccttcctagtgatgcttgtcataatccaggagtaacagtgaactaacagcttgttgtttccaaatatttacatgaatatgtgtgctaaatgctgtctttataatctgctaatttgcatttgttttgaaggataagtttttaaaaagctgctataaacctgatgtttatgaattgtggctagttcctaggaaacttaattcgaagggtttgaatctctcttctcctcactgtggttgactgggaatctcagggtactcattttcatagctttggagcaaacttgctctggcagaagagcatacaaagatgatgatggcaataggttaatgaaaaccttgaaaaacactgagatgattcggcatctggtgactggtgatgaagatttccacttctctggtattgatgtctctttaatacgttgagccatctagacagtgcatttccagttgtgctttaattaacaacgaaatgaaaacaggaaagaaaccagcatgtttttccagacagtaacatatgcagcccttgaacatccaagtggaagctcctcaaaaccctatggtagcatctgtacccttcctcctttggttagcaatatggatgcttaagaatcttttccagtttccctggaaaaatcaaaatgcaagcagtaaacatctagagtatatccagtctattagtgttacatatatgtctgacaatactgcccaacacagtgcaaacagataccactgtaataagtagtgcaaacataagaaagtcctaattccagacttgttaaaaccttctggctgttggtgctgcatatctatgtgctgttgaaaaacaaaactagcagtgataaaagttctgtagctggtttgaaccagaaacatcatggttaatttgccaaccaaacacttcgatgaacaaagttagacaatgcaggcaattactaaatcgataaaaaggagtaagaaatcaggctgacttagcatctagcttatgtatgtggtatcttagatgttttctcatttatccacacaggtaccatttggagatgaatagccttcatattaaaaaaaaattatactttaaacaaatgacgtgtaagtcaatctcggaagttaggggtaaagctagagattggagcgtgtgaatgtgcgcgagcacacacacacacacacacacacacacacacacacaacacacacacactcttcaacatcactaggagagaaattgatcacattttaattgtggcatatatcacaattaattgtactcacttaagatctattccaacctcttcaaaagttgacttccctaattatagactttgtcctaaaatgtaagccaaataaattcttttctcccctaaattgttttgaacagtattttatgactataacagaaatgtgccctggagaccaggcatgtgagcctaagaacaaggaaaggctagtcaagctgtgtccctcagaatggtgaccctcccaatgacaactaggcagcaagcagccatctgcacagttgcctgttacagaaccaaacacaggagaaggtaagatttcacacatgtctgtccacactcacacctgctgctgcctgaagggcatctgcttctctgaaagaatgtcccaggcctggggacagccatgcagcttttcggagtcaaggagagacctcaagtcagtcagctaaggcaggagccctgataagcttctgcattccctcagccacaatcctagtatatgcagaggaggctggaggcaaaccaacagtgtgggggcttgcagtcagactgtcctctaccctagctcaggggcaccaggcaatttaaactttgaacttgaatgagtcccaggttacctgacagaaacagatggagagcctcttctggggtagacacccaactttaggcctagtgttatccctgcaaataaattttcaaatgcagtgtccagtacggcaaaggtatgggggccttaggcagacaagactgagtgagaagcagcaaaaacagggagaaaccttatcgttacaggacaaatcccatcaacaaatggcctagacctgctgccaccttcccagcaagtgttaggtggttacaggtattgtgagtgaggtgcagagctcagaagccaggatccaagacgagactcggggactcagggcatcatacatgtctgaatcatacatgtcctgcctttggaataccgcagggctcatgggtgctgggttgctgtggctttcctgcatagggctaacagtcatcccttagcaccaaagcagcctgggtacggaacactacagcaggaggagaagccctccctgtgggatgacttcaagtgatcttcaagccttctgttgtcaggttcctagtggaacaactagcagagacaaaagacttgtgggcctgatctgattgttttaacagccatcttatccctgataggaaaagaacatgaccatcacacagaattaaaatttataaacacaaatgaccttgtaatttttatattctaaaagaaaaactttgataatatgcagagagtgtttatgaggagatacacatgtttagtaacatatctgttaatatgtgtagtacataagtttgcatatttccaggacttctgtttactaaaggatatacacatgcacacacacacaaacacaccggacatactggacttgcactttagctgttatttacagtagatgcataacacacatgtgtactacgaaacaatagctttccactcctgtcagcattaggatgggaggggtgacaaacagggtcagtttactgcagctaaaaagaataataagaatagtcatttaaactaaggcaacattttgataattccctaattccctcctatctccagaattctctaaaatgtttaaggggcttatatgtgtcttcttgtgaccctgggggatacagcagaatgacaatgacaggtgtctgatactttggggctgtcaagactgtccctcatgtcagacctttattggatgcagccacttagtttaatttaagcctggtggttttccttagtgactaagccccacctcatctctctctgtccttgccagtctcaccaaggtcgtccgtgcgtttgaaataaccccagagcctgcctggctgacctgcatattgtttttaccatgtttgttctcatgactcaactccccgactctcagctaagtacaggtgaacttgttggtcactcccaaattaatatgaggtctaagggaggctgaagagcccaggctagtgctctctacctgactacactgtttggtcctgtgactgtgctgtagtcttcagtctttggcatccctcttggtatagcaaacatttctctctgcatagaaggctcagccttgatcttaaaagtcaaaggtcacagcgctgatttgtctgctggctctcctctgagagattccctggagaagaggggccaggcttgtcattttactttctcccagccctgctcctgcctcatcttcttcattcctcagtagaaagtgttactccaagagacacagttccagacatgcaaggagaaagcggttgatggataaagaaaaccagaagaaagactgttcagcctgccatcatctgagtgacattagtaaaccagttgcttttgggaaaaggaaataggtagcttgttgagccagaaatgtttgaaattagcctccatcaagataactggacactggcaaaaaaaatgtacagaatgtattgagacaatctatctgtcttccaaatgattcaccatctattatgttatcttgaaaactttgaaacatttgtagaagtttatagttcgttttacaagaaaagatcataaaatctcatttgcgatcataccagagacaaacacttctggagaatgacctttaggaaacgtttttgtaattgtgtatggtgtgtgtatttggatcacttcctttatttcttcagagaatacatttttgtccaattaattttcttttttcctgaattgcctaaggactctactcatcccttcccgaattcagggcctcagatgtcacatgccagcaggctggcagatgcagtctgcccaccagtcctttgcgctggttcctgcttcctcgtcaccatggtggctgggtctgcaaggctctatgactttgtgccctgccctgggagagcctgtgacatgctggattattgccagtgctatgctggctcctcacccagcccctgaggttcacacttttcctgcactctcttgtgccatccgttctttttaaagatgacaccatgtcaggacggctgggtccagaggaccaggagagcttccgtgcaaagtaggctcagagtgtcttcctaatgcccgggttctgtcagaatcagtcttctcccactttaaacctcttgttgagcccgggactagttcccataattcttcagattcacattgatctggcctttgtggcttttgatgtccttcctgccagcggctgtcaacaatggccaacctctgaaatgctggggaagctaaagaatggaacttgcattgctttcctccaaagatctttctgtctgtttcctttgcttgtttgctggtgtacctctgctgattagcacatcccttcctcagtgacctgcggcacacgtgatgaacacatttgatggatgccatgcatgctcataggatatatgttaccctctccgataacacttcttcatggaaattttacaaatttcccaacttaaccacctatttatccatctcataacccataaatgtgttaaatcttccaaccgaatgttcctataagtcactggaaatttcctacccagaattgatcccgccataacagttcttgggcttattttcttaatacctgaccttgcttccaataaccatattagcacctacaatgatatataaggcatagttggaactaaagaaatcattgtttactaaatcgcattgtaggtttgagcaatcctatgtaatcttccctacctgtgttgtagactaagggagaaacatgaagaaaaaaatgagacccaggagagagcacaatatcacatttaaaattgataaatcacataaaataggatgtggcatacatgtgcaagataaatatttaaatctgggcaatgatagacaatgtcttcagccaatcaggacagtcctgaacagatcccttctacccaccaggacgagaccacagccttgccaaattcactgtctactcccattcaagatgtatgtaggagtttggggtaaggtattcttcagtgacagtaagcttcttttgtagcagttgagcatcactcctcacggaagaaaagtccttatccaaaatatcatctcacctgtttggctatcaagcctacaagtatagggaaaatgggtaaaggtgtagtattagcactgcccagcaagagtctcaacttataaagactagctctgtgtcatagttaagttgctatcctgtatcagcttcaaaatgtcactgacttgctacaaatctagtccctatgtctttctgtgagatctactggtgttgggttactttttcacattaccttagaattttcactgttggcattggatcaaagttcaagagattatctaatacttctttgggctttataaactcaccttataagaaattaggagctagcactagaaacataacagatactaacttaaaatcttagccactaaattgttatagaaatataaatcatgtgagttttgatgataaaacaccggaaattgatcttttaattacaatttttgtcattcaggctagttaaaatttgctaataaatattggacatattatctataccaagcaagctgctaagttggttaaagtatcatctgccctgattttcatagcaaacttgtaaaataaatagaatttcttggtctacaatccaaataaaaaacattttagtggtgtcaggcatgctggcacaggagtataatgtcagcactcaggaggtgaaggaagcaggtttgtgaatgaaaggccagcctaggctatacaataagagacctttgaaaccattggtttgatgaggtccagggattcttctcaatggcaatttccatctgattcttactttaagggacatgagtgttcaaaaagttgcttgatctggaatgagtatttatttgccttggtcaactcaaccatacatgcagacagtgaaccatttcctaattagttaggggaaatggataaaattcagagttaagactgatttctgtagtgggttatactttcacagtaaacctcattcgtatactttttaaaatgtgatttaaaacctatccatagataattacagggaatccacaaactatttgtttttgttcaacagtgttttacattcaaggagaggagtggtagatttttagcttttgacacagaaaagctatttgaatcataagaaatggctgctttgtagatttattcaatagctaaatatccagttgcctctaagtaagatgtcatgttacttcagtccttttgctcatttgaagtgaaattaactcacagtttcacagtttatctactgtgaatctgaacagttaagtaggacagagggaaaggtgcagttccattaagatctggtgtaccagtggctgtcaggtaagccttgttatgctgtccatcctcatttaactatcccacaagatctcttaatgaagttaagccccaagttcactccaataattctgtggcaagagtttgtgcattgtaacaattcatcatttgtcaggaaggcacttttagtttatacatttaataagggcatcctctagcttggttaattagaagtgaacagtttgcatatttactaaatgtggagtgtcattgctaccacggcctattgcctacatgaattatttctctatctgcaataaacagctgggtaattattactgccataatcagataaattcccactgtaaggcttttcttacatggcaattctttgaactcatcgaaagctgagcaaaatttatgaactccagcagctaggccacttttcatactatggtgtccctgttccctatttcaaggacacaagtagagcaccacagttattgtgtaaataaggagaataatgtgatgaccaaagacagcatttcagtaaacctcatctttagaacacattatcccaatctcaaccaactacccagagaggtttgcctttaccaaattagatgcagattataatcctatgataagagctagcctaaagactgaaaaaaaataacatcttattttacaaaaccgcaagtcagtctgtgatgttagctgctcatgtcacttttatgtgtagactctcttttgtatatgacgatacagcaatttagatgctagtatattgaagtgtgtagcttaaagtgtagagtgtattctttgctttaaagggcatcccctgtttattttctctaagtgcaggtgcctcatgtattaatatacaaactccatcagtcctactggaaggtaggtctgtgctattgtggacgtgtccctgagaaagggacttgctggaaggctgggctcctgacttctatagcacagtgaccctgctaaatgagtctgccctcatttctcttagaacctaaacctcactccactcttctctgttttcctctgctaataaggttttgctccattttttgtgtgtttgttgggttttgtttggtttgttatttgggggtttgctttgtttgagatagagtctctctgagtaagcagaactggctggcctggaactagctatggagacaaggatagaactcacagaggtgtgcctgcctccacctctgattaaagagtaaaggcatgcaccatcacagctggcttctgtgagtgctggatctgccaggccttgattgagtattggtgtcttgtcctttcactgaacctgatgtggacagtcccatctgtttctctgaattttgccatttggtatggttcataaatcaaaacctcctgcccagaattcctgataattttatccttttgctcagatgcctgctagcatcactatttggtcatctgtagatacttcaaggtagcatgctcatgaacaaagcaattgttctcctaaatctcttcctcttcctctagttagacaagtctatacttactcaagccagaaacaagaaaggttttccacacttgatcttagccaagggaatcaattaggatttatcctaataactacttcattctctatttgactaaatcccagaaatatttttcctacacttctgttctcactctgatccctcctgcttttataatcatttttctaaacaaaaatacaatcatcatagtccagtactttacctgaaaccacagtaaaagatgactgggggaccatagagcctgtgaaccatgtaagtaggcatccatatttgagtgttgtcatttcttatccagcattaagaattcagcaaacccagaacaagtacttgtagtgtattctttttaaagggtgtattcctgtttttattttattcttgtatatgtgtatctctgtgagtgtatgaggtgtgtgtgtatgtctgaggaggacagaagagggtatttgatctcctgaatctggagttacaggtatttggcagctgtctgacatgggtactgggaaccaaacttgggtcttgtgaagagcagcaagtgccactaatcactgtgccctgtctctagtcctgaccttattcctaaatcattgtaacacttaaaaacatgagctttcaggaaatggtgagtgaacatcataattattacattaacaaaaatcgacaattcctggagcacctttacatctagaaaatacagaattttgtgataagttggaaattctgaagcgactgcctgctccaaatgcactggattgatagaaggccatttatatttttgactatcactgatgtgaactcaacattgtcatgttatcccacattttctgcatccatttttccttcgtctagggatagcactgacacaagcgaaaaagtcacttaacgatagatgagatgaccttctttgtggcatcatatggaaatgattcctgggatcaggaataaagcacctaatctttagtttctcaaagctcatgggtattcactgaattgtatggggtggctgctttaaacctgatagtcttgtcctttggtgagagcagagctgtcactggatggtatctggtggattacatgcaaaagcagtttcaattattcttatgttaaaacacagttaacacattttaagtgagaggcaatgtgcaatatttgagcaaacacacaaataatgtcatgcgtctcttttcctgtgaaatgagattgtcagccacctcaactctgaacttaacctaaatgattctgcaagttgatccttccccacagttgaatcactacaaagatgcacggaaaacagtgtgatgggcttgatccaccctcaccaagaactcctcggtgctatgtctcaaaggcccatatctagagtcatttcatttcacaaagagcacaggcaccttaaatgacacctgcccttgctgacctccatgtgatttgtgaggataggtaaatgtctgtgaaatacttggattcctgagcttaatgagtgtgtgagtatacaacttgttctgttgttctacttagcatgggttgctcccaattatttggcatcagatatattatataaacttttacttccttctacagaaaggatccataataaaaataacttcccactgaagtattataagttaaatattttagaagtaatgccacacagaaaatctttcaaatatgttgattcaaaatagcgagtagaaagaaaaatacttatttttgtgaatgatctctgagtgggtcttaatgctttgtgaattcatgcaaaaatgagtaactgaaaagagagcaatgggacactctccaaggtcagagtgcatcatggtgctcttattttataatagtgaccattagaatattttaaacttcctttttagtcctaaaaatatctacttgtagtcacagatttgccactgtcatgcatccatccatgtatgactaggagacattattctactatgatgttatttctgccttttgctgctgatggttaaaatctatgagacagggtggggactcttgtgaatgaccccactccactgtgtctcaatgcatttctctctactccccctttctgtgcttagaagaagccttctcaactctcattccagctacaaggccaccactcccatcatgcctttctgacccctcccatcagaagtgagattcctgaactaaagcactgtgcaactgtctctttcatagacttgttctgtcaatctaggaaggtgttagctgttttatttgcaagctccttaaaaacagggactagactttgcatgtcattacctttaatatctcaagtgagcatgtgacaagattcttttctcaaataacatatcctgcttatggcttcccttccctccataccttctagttgctcccactccctttcccatccgaatccactccctgtctgtctctcattagaaaagagcagacttctaagagatgataaaatataaaaaagaaaatacagtcagataaaaacaaaaaaatatcacattagagtaggacaagacataccaacagaaagaagagagctcaagagaaagtgcaagaatcacagacccactaactctctcactcagaagtcccattaaaccccagctagagccacgccatgcacagagcaccaggtacagaccctgttcatgctgcctcagtcgttgtgagttcatatgaggtttcatttagaaggccttgtcttcttgatgttaattagcccttaaagtagtttagacattttgtgagagaaacacatcttatactgaaatgaaggctttgtaggaattgctaaattgtatgtgtgtgtacctatgtggacatgcatgtggaggctagagaactttgagtatcattctccatgttactaaccttatttgtttgagacaagacctctcatcgaccttgaattcaccaagtgggctagagtagctggcaagtaacctgtaggtgtctgttggtctcttgtctcccctggtgttacaagcatgtgccatcactcctgactttttttttttaatttaagttgggtcctagagctcaaactccattcctttgcaaagtagttactttatgaattaaaccatctgcccatccatgacagttactcttttgtcttaaatgagaagacctttctaaatatttctgaaatactaaaatctctagataaaggagccagaggttttatagtcttcaaaatatatttaaatgttaagtattcagaccaagaatatgattagctttattgtggctttttcgtctactatctttcatctgtttatttaatttgtagattgagacaaacaaggtcttgtgtagctcttgctggccttgaactcatatatacttaaggatgaccttgatctcctgatcttcttgcctccacttcctaagtactgagatttcaggtgtttgccactgtgcctggttctccttttccttttattatctattaatttgcttcaatatggacacacagagagcaaacagccattaacaacaaaatgtaaggatgcctgttatccttcttcatgtcttgttcaggcagacatgttgattagacttcatggttctaatcagatatttataggacatgcagtatcacagcaaacttcctgttcctctttcatgatagttcctgagccttaggtgcaaggagttgtgttatagatatatccgttgggaatagacaccacatgaccatttgttctctgcattttgatcagttgtgattatctcttatggtctccatctctttcaaagagatgttcctttgatgagaaataaggactgcacttatcggtgggtataaggacaaatatttagaatggagttaggaattacgctggcatggtaggggaaatctcacaaggccttaaccctaaccaaaaattaaaggcaactaaggactgctgagaactgggaaacagtcttccccagggaagtggtgtcaacattgcagctctaatggaaaggtaccctggcagtcaggagccaagcaccagggagaggttcccaaagcactttgtgcttatttgagagctctatgcagtattgtcactggttttctctgctggttttggcaattgcatttttaaaaatgatctcatatcactctttatttctctgccaatttatcattttcaagaatcttttgtgacacataccctgtcttgtggcacctcagtgctttgcttatgtagtgatatgcatgttagaatcacaactggaacactctgagtttcttttatgacatcatcctagtgaacagaactgagccttcccaatcatctcccaaagcccagtctgaattccgacagggccctcccagaagttctgataggctagtctgggtggaacctggaatgtgtatttctagcaactagggactgtggaggggtctccagagtgactgtgggaggggtctccagagtgactgtgggaggggtctccagtgtgactgtgggaggggtttctagagtgactgtggaggggtctccagagtgactgtgggaggggtctccagagtgactgtggaggggtctccagagtgactgtgggaggggtctccagagtgactgtgggaggggtctccagagtgactgtgggaggggtctccagagtgactgtgggaggggtctccagagtgactgtgggaggggtctccagtgtgactgtgggaggggtctccagagtgactgtgggaggggtctccagtgtgactgtgggaggggtctccagtgtgactgtgggaggggtctccagtgtgactgtggaggggtctccagagtgactgtggaggggtctccggcagggactgtgggaggggtctccagtgtgactgtgggaggggtctccggcagggactgtgggaggggtctccggcagggactgtgggaggggtctccagagtgactgtggaggggtctccagagtgactggggaggggtctccagagtgactgtggaggggtctccagagtgactgtgggaggggtctccagagtgactgtgggaggggtctccagagtgactgtgggaggggtctccagtgtgactgtgggaggggtctccagtgtgactgtgggaggggtctccagtgtgactgtgggaggggtctccagtgtgactgtgggaggggtctccagagtgactgtgggaggggtctccagtgtgactgtggaggggtctccagagtgactgtgggaggggtctccagtgtgactgtggaggggtctccggcagggactgtgggaggggtctccagagtgactgtgggaggggtctccagtgtgactgtgggaggggtctccagtgtgactgtgggaggggtctccagagtgactgtgggaggggtctccagagtgactgtggaggggtctccagagtgactgtggaggggtctccagagtgactgtggaggggtctccagtagtgtctgtaggattcccagcaggagaaactaaagcaggggctttgagaagtgcatggcatcttagtgaatgaactccagtcctgagttttggcatttgacttacatgtgccctttgtaacaatgccagagagtggattattaaatacacaagtttttgtttgtttttttccctcaccattctgtagactaggaagtctaagattaagatgccagaagatctagtacctggtgcgaacactcttgttggcagatgatcgtcttctctctcagccccacgtgctagggaaagccacagcatcagagcctacttcttatgatgacccaaataccctgcagtgagagtgaggaccaccctcaggaatttgctctgtaaaacctctccaatcccacgttggaaagcagcattggcagcacttgatttttgtctgtcttttgctttctcgcaactatcacaccgaactcccatcctcccctcagattcaccacagacttcctaatgagacagacaaaagtgtttagttcaggtcagtaccctagcacttagtaggactatttcaagtgcatgtattcatacatgcagctgtggtgtgctgtgaaagtattagacctataagtgaagaaccaagccctgtggtggtggaaacagctgagcattattgatgaagccttcctcacagaatggggaaggtatttgatggccagcgagatggctctgaatgaagaaggaacttgtcaccaagcctgacaactaggtccaatcctcaggacccataagatctttagtatggattgtttatggaaacaattttgagcaggttgtcgtttctcaaaaaatagtttgtgggaaatattttcctaggtttggcgtagactttggggaaaatcaagaaacaagctaacaagtcattgtagtaaagaaatgatgtgtgcgaactgcatgaaaggaagtaatggcagcttaggcaggctcaggattcagagggctagcgaactcacctctgtcacttccctggagtttctgccatcattcactaaatacttacatggagacaaaaaatcctttaaaagtttacactcattacaatgttcctactatccaggactaccttacaaagtagatttacttccacattcaaatagacaggaacaacacagacggggtctttgtttttatggagtttgaagtctagtggaagactcatattaaataagcctgtgcataaatatatgattgcagtactgtttttagtgtatgaatgagaagcacagtgggagaagaatgcaaactaaaggatgctgcaaatagagcgtgcatggattgtatgtgaaggtccacacagtgtgctgagatggaaccagatgagaccaagtcatggtgatgtggtggcggcggtggcggcgggggggggggggttaagatgaattgttgagtagaatggacaaaagccagggactagcctcaaagtccttgtaacattttactgtttgttagcttcaaaatatcttttcagttccattatccttttaaaattagaaacatgcatcctgccattttcactttatcaaaaaataggaagtggaaagcatagcctaaggaagagagacccataggtgtaaatcaaaatcatgttctctgtttccgtgtagccacctacttctaatgctatgaactgattataaaagagtataatcaatttaaactatttccaaacttatctttttcctcttgtatgcaaaatagtgtaggtactatgatattcagctactttctcagaaaaatcctatcagcatctaaataaaatattagataaagcaaaatacataatatgaatttaacatcatgattaaaggcatagatttgggagtcagacctaaattccaattctactttctaattgtgggtatttgatggagatttaatatttatgaatctcatctcctaatctgtgaaaccagactgatatagtctgtccaatgggacttttttttctagtaagacataaagaattatgaagtagacagtctatcttcctaaggaatttcctaagaacagaacaaagacaaagtgctggtactctttggatcattgagatcagtgcagcaagggtgagaaaaggaacgtgtaatgtgtgtatgaggaaagagacttggaaaagctcacctagtgaatgagttaggaacagaaactgggaaagtggagaggggtgaacaggaggcagtgctcttcatcagtgccagagtcttaggaagttctggggtttggatggctggttgcagtgctccacactgaggcaaaggctctgagcctgtgtttcctcccttagtcaacaaatgcaacctataaggcaaggttagcaaagctagtttcccccgttccgttcagttatgaagttgagttaggagcaagcagtcagcagcccacactcctggctgctgcaggctaagatgctttggtccagtgtggggattttgatgtggtaagcaccacctctggtcattgcctccacacatagacccatagtgatgcaacagagcctagcagacatgctggccatcagtaagccacagctttcttcgaggttcaaggtgaaccctctcctcaaggtgaaacaactctgccatgtagtatgaggaggatagaggaaagagatatatttacatgtttactttctctcttctccactggtgacagttctgttcatgtctcatgcctcttaggaagccagatactgtgttcttcattgtgacattgcatgcacacagtatgcactcataagaggaatatcaccaaaagatttaaacagagcatgaaaaatctgtagtaaatagagtagccttgcacctagtgtataggcagtgctgaagaaaacgaatgctggcatagcaatgctctgcatagattcagcctgtctggttctcacaatagcctaatgagaacgatggtagtattagtgtgttttcactttctagatgatggtattgaagatcagaggttaaacagcaagcaaacagcacagtgcagattgtgtgaccagggtcattgcagagcacgttcctagctactccactatattgcctcccagtggctacttttatttttatcatcactgtcattctagaagatgtaaatatttatcactataaatgccatttcgaaacatgtgtcaaaaataaatcttagtatttgcagtagttttcatctgtatatactatcacagaatgttttaggacaatgaaaatggtgcaaaaaatccaagtatcttgtattgtagaaaaataggatcataagataaaaaaagacatgcgtggctaactcagtggaaagtagcgtctctgtctcatgtctggatggatgaggactgcagtctcctctgcagtcagaaaccctgcaagtccaggttctcatcggttctggccattagataaatctttatctgtgcttgtttctccctgatgtaaactaggataatcagtaccttcacttgttattctaaattatctcaaaggcttataagaggaaccatggaggaattgcttgtttttcacactaatatctttacatgataacaaaagtaaagattaaaatgcataaagcacttcctttttgtgtaacttgattgttatttttcctggtaaaaattctcatttgctcatatgtaactgtcttgaaatgtgtaccttaaggacaaagaaaggtcaccaattcctctaactcctggttctttgtcaaaaagtggacacagttaatgaggtttgtttggtacagaacaaattcgcagacacagacggagatgctttcaatggaaacaaatttgtttggctttaccaggttacttagcgattaataatagccttgagatgcagtcagggaggtcattgtcccagcttgccaacacaatctcaatgtgcagctagcccaggctggtgggtacagaagccccccaaatcccatgcataaaggaaaacaggttatttctgcctccttttttcatattaataagcaattttcaagggaagggtggcaaaatgggggccatgccactccaagtaattcatttattttgcaatttaatcttacgttgaaaaaaattgctctgctgcagtagcctagcatggtgatttttaaacgtcagagtgtttcataagtaaccttgtgtgaagtattagtagcctggaacagggaattgcaataaaaatcttaccacactcaggtagcaaggagaatactttatttattttttttttactatctctttctagttttccctgacatgtatgaagcaaaggctatgatgatttctttgaaattttacatatggaagtagacaccaagttatatatttatttctaaaatacgacagtattaagatgctgctctgccatgagtgataaatgtgttcaatgaaaacaaaagatgcaacctttcttccttatttgataacatcatgtcctatttggaagctattgatcacacagtataatgtaaagcttatttttcatttaaatttcatagaagtattcgcaaatgaggaaatttttcattttgtggaacttttcatgctttaaaaagattttaacttctaaccttttacttaaattatttccataattgaataaaatgtcaattctttatatacaggataatatgtgtaatcttattggtattaattgaactgttaactgatttaaacatagaatcaactaagcatgtataaaatctgtactttaaaagatacagtgatcagtatacaaaataagtaagcagacatttgtaaatacaaactaaaatttaagacacatctttccttgggatatttaagtgtctccagaatagccagtcttcaccaaaggaaactggtgatgtagaaagccactcactttgcactgaattttgacactccttttgccattgtattaattataacaagtaccctttttggtgttgaaaactccatcatgaaaaaaagtcacttaaatgctgtctaacagcggcaaagatttccacacagttcacaggcaagataaattgcacccttgattttgatggatgtgggtgatcattgcccctcaaaaatcttgattttcatcagtaaaagaattagggaatcaacagatgtcatcagagtaactgctgacaattttgatgcagggaggctctggaggagttcgccgagatgaaagagacagaagagaggaaggcgcgcctggagaaggaagagaagctcagagatcagcaagcccgcaagatgcattacctgctcagcacaaatcaggttagtctacctgtgcttggcagctcccatgagccacttggacccctagcctgacagagataaactagcaggctgaataggacatggcttgttgaaaagataccacaaagacacgacttcgagttcaatttcatgtgtctgtgtaggtgtgcacaggcaccgtgattggtctgtgacagggcacagtgcttcatagaggcagccactgagccacaggcagaaaggctcaagtcagcagcgtgatcaccacagtgataacacaacatgaagggcataacctcgccttcaaaactcattccaagtggcttgttggtgtgttgtgagttgatcaagaactagcaggttattaagctgagctggctttcaggttttctcttttaattgagtggctgctgagattaagcccgtcctccctcctttgccaatttttgatggaagttgtcaggtaatgcttttcaacggattacctcagcaattacaacttcatatggagagatacaaatggaatttagaatacttagacgttaatttttaagattttgttacagttgccaagaaagagtacattgcatttagaattttcttcacagagaaattggctttaaatgtatgagttggctgatgagatggctcagtaggtgacagtacttgccaccagcctgatgacctgggttcaagtcccaggaccctaatagtgggagaacagagctggctcctttcttttatttattctagttatcaatgagaattaataagtgatcatcacagtgtggtctccatatgggtgtgctctccaccttcactttacacgatatcattgatgttaggacattgcaggtgaaattgtgttgtcaaatctcctccttggagaagaataaagatgtcagagattttgttggctctggcaatttagtttatgtagttatggtgatcttgatatttaactgtaggtaacaaaggagatgaaaggataatctttgaacctatggagaaaagccccaccccccccttcctgagcaaacttcttggtgataaaatagaagactgataccatcttattgtccagtctgtccatttgtccataacatctgatgtgctgccagctgatgctgggaaacccatgccttccattgcaaacccaccaggtctcttctgcttcattttaatcgacatttgtcatcacatataaagaggcagaacttgaagactacaaagacttagtacagtgaatatgactcctccccagcctgtaccctggaccacatgtctctgaatgcctgccctccatgggcactgtgctgggaatttagtacatgcaagtgtttactaacagatccttggccagaaggagcacagatcctcatgtcagtctcctgccacaaacctttttaactggagaaaattgctgtctttgagcagtctccctcatttagattttgctgttgcaatacactgatttgttccatttaataagcaattttaaacacttcacctaaataaaaagggactgagtgttgttactcacttgccttaatgacttggctattgggtggaaattgatctctggattttaaaatattcttagttgtttgggttaactcccctggactgcctatcacaggaaacttcagtttcaaaaaattagtgttttaattgtcaatggaagttgtacatactttttgtgagaagtatacctgtatacaaacagttttgttgaactgtgtaaatagaacccctgtagcatttttagaagagaacgtagtttattggaaactccaataacttagtaacgatattattaatatgcaatgtacaatacttattttgacataaatttccatagttctgatatagcttaacctagttaatagctataaaacattagtcaggtaaataatgttttcaaaacactgaagaacttatcagaacaaagttgtgtttgttaattcagacatagatgtttttaatgaattaataacgttagactaattatgctgatatattgatatttactgacacaatttaaaatttacacttaattttaagcctattttagcttgaatctgatgtacaatttaaaatagttttagaagctattcataatttttgttatctcatctttattcaagcaaatatgtttgtgctaataggagttacatgagtaaataagtagtattgcaatgagtgaattaatagacccctcagggctttattaattaaaaagttcaagtcatagtagagcaccttttttatatgtttatttcaatcagaaagctgaacatgctgacttatttgcataaataatcaatcaccatttactagtagtaataaggttaatttgttgctgcagacataacagggttagtcaattatatttcctagaaaatactatttgttatgcaccgacacctgtaaagcaggattgtgtttaagtcctcactaaatgaacacatcaaaaagtctttgtccctgtaaaaattttttgaaaggaaagctgattttagttgatttgaataaagtaaaatgcaagcaatgcctccatttgtaaatttaatttatctttctgcaaagattgattatttaataaagttatttagtttgattcagtaaccagtcaagccaaatctaacacatacagggcatatttcctttgaagaaaatctcatttacagatttgttttcttccaaagaaactgactttcattccattgcccttgttctccgtaataaattatgctgtctgctccacctactggtatatgtgtgcaaaggcttgttgttgtgttcactaaaggaaaacactgcttcctgaggatcagcggtcacagggatgcatgtaaagctcaaggtgcaaattcaagagctagtgctttgaaatgagcgtcactctataggattatccacagtggtaattaactgacactcggaagtcgttaatatgatggtaggaagggttgtatgaacacaacaaggaccaaaactcagttcacacacattgaagtggagatgtattatagaaatagttttcatgttatcatctacatattactttttgatggttttccaattttcatgtggatacaaaaggaatacatttcagttttgtgatttttcaaaaaggccctttgctgtgatcattattgacaaactataacttgatatacttgaatatttggaaaactaaaatgtgtgcagtcaccttttttttttgagaccacaccaaatcgaatttatataaacagggaatatatcttaattaaaacttacacttgacctagtcataataaactggtagtctgttaagtgggaaacatgtttctaagacaaagcttatgaggtgaaattttaaatgtgtattacctcccaccctgtcttctgaggacagtacgccgacatgacaggttctcagcaggtgtacactgaggacttagtttatggcttgcacctccatcttgagatggacccacaggaagatggctctccctgtatgcacgcgccattctctgcatgtgtgaccctatgggtgtatgtggggcagatgtctcgtgaatttgggaatcccgcatttggacaggcttcttgggagacagggctcttaggatggagtactggctgtcacagggaagcttgggagcagtggaggtcctggtcactgatgtgtctggaccacaccttgtgcctgttggtcctgtcttagaggccgcttcactcacattaggaccagtggctacttagttgcaccctttctctttgttatattttcctgttgtgcctttttgacttaatgcattttctatgatgtttcatttcattgccctgtgtgtgcttcaagacagctttggcatgcccagttaagtcttttgctctttatcccaatatatctaccccagtccagttaatctttcaaaaatacccttatttcatttctatttgaagtttataaacctccaaaggtgtcatgttgtctatttgataaaatccttgtatacccccagattaacacagctctcagaccttaccagaggaatttctttatgcaattgctggcagttaaggcagaaactcacaacttgtgaaagtgtagagaacagataagagtggagtactcagccataaagggacaccgggttcccactcccttccccaaggctcaggggacattgaagaaacaccagctgaaggactgtgagagccgaggtcagggaggactggagggagacagtgtcctctgcacatgacaggaccagggcactcatgagctcacagcgctgaggtggcttgcaccagacctgcacaaggtcaagccagaaagcgccctagtgtggaggggagaggggcccacaggcctcacctctaactgtggagctatggggaaggacatttggttttaagggtatggcccctcgttggtcaaccatgacccagttggcagccccacagccatgagtgtgtggcagcacagattgaacctgatgggttgttaaaactaatttagaaagaggacaagaggacacaaagatgggaagggtttgggggtggatctgggaggatttttggaggatttgggtgttgactatgaccaagatacattgtatgcctatatgaaattttcaaagaattaacaaaaatatatttaaaacaatccttccttttcagcgtcaaaactgacagccctccgctatctacctccgccctgccttctcagtcttttcttcctttgctcctctgtgtggtcatcccatcacagcctggtattctattcaagaaaatctcaccgaaaggattgcttacacacggacgaagctgcttaccttacagctagttacattctgcacactgagtcctgctcccgtcacaaaaagggcaacttctaacaacttcccgcccacactgaccttgcccattcctttactgttgaagacattttcctccctcctattaaactactttatcaatgaaatacatgaactggtcagctgtccttattagtgtagattgtcgaaaactggaagattgttagcagttcataagaggaacaggggagaaatgtctgcccaggagtcagagaacaagctcagagtataaagatgtgggagacagttggtgggaagggatctcagtttgtaaaagtgctcagggaacccatggagtatatctatctgggcaacaaaataagtatttatggcaccaaaataaatacaaatgagccagacacttaggagagaagagttgatcattttggagggctccctactactcaggttcacttattggcccattaccctgtgtacctcttatatttgctttctgaatcgtgtgttcgcagctactgagtctacattctttcatggcctgtaattttgttgaggaagatttctacaggagtggaaaagggctgggagttaagacaggttgataaaggtatggttggtgtaacagccttggaggggtatgggagacagtatttcactgtatacataacctaggttattgtggctcactatgtagccgcactagtcttgaaatcacagaaattctcttgtcttagcctccctaaaggctggaattgcagaaatcaggcgccatactggtagggcctgagaggtagtgttttacgttttgtgtgaagaagcacgcactgaatttagctaagaggcagggggtgctgtgcaattgattggtcagactgcctttccagccccttcttccaaagcaaggctaatcatttaaagatgcatctgtttgctcacgggtggactccagcttacataaaatgtgtgatgctggagtgcccaggagaactcaggcactggaagacaaatcggtgcccacgcatgactcacttgtgacgtctacatgcacggccctccataccacttctcaggatccagagatccttcgtggaagataggtaccccatctccaaactcttgtcctacagaagggtgcaactgtgcttacagaaatgtgctcaaccagccaatggacactcacagaagaaaaccctcagagcctttatgcaaagccatgcataaagtaggcagccacggaaattccgtgtgcacaactcaagccagtcatatttatctgtctccacgtgtgtgtcttcacagtgttctgtgaagcagcaggtacctcagcagcattgaccaagatgttatctggacattttccccgcttcgagtggttggtattcattctttcaagaagactgtgcagttgataaaggcatgacctctgatttagggacccatagttgaagaaggccttggagcctggctattcgctgtgcatccctctgagcagtccataccgcaatggtaccctatcatcctatcatcctgtcaccctatcatcctatcatcctatcatcctccatcacgtttgtgggcctcacttgggaaaaacgaaagcctgacctagtgcaagaaccaactcagctttagctttacattttgccttctccctctttcatgctatatatactttttattatattgtaacacatggaaaagattaattgttatcctcaattctcattaagtagaaagaattaagtggcaggggggaagttgtcaccaaattagtcccttctctgctccattcccatagtcctgactgccatatacatctaagaaattcagacaaaaatgtgaacaaaacaaaaatcagaacccactgaagagaaacagaaacttaggaaactgccttagacacacacacacacacacacacacacacacacacacacacacacacacaatttgttttcaacgtgcaacactaaaaaaaatattttttaaatggattcttgaggaagacatcataaaactttccctttttgtgattaaaaaatggaaccctgctatgggcctgaaacttacatgattttggaatccacttgttaaatgtatttcttttattgattttttaaaaattattgtctgtggaagggtggtatgtgcgtggagtgaggtgcccatgggggtcaaaggctaggaaccccggactacagctgcagttttaggtaatataattctaaatgcaaccgaatgaatacactttttcctgggatgtaggttaggtagaatagcccaggcttcccaccctttagacactggttccaatgtccagtgatgaaaaggagaaaagaggaggcaaagagtagggaggagggggacaaaggtaggaagaggaagaggagaaggagggaaggaggtagaagaggtggaggagaaggaaagaagggagaaattattataatgatgcaccatttcagattcatacaaaatattaaaagtccaagtgttcaaccactcacaggcccaaatagaacttctttgattaactgcttgacccagctctgtaatatttgttctctgtgttttgacaataattttgttacacttcccaaagtgacaagagaattattcattctctcctctagcaatattaatctaagtttttattactatggaaagaaaggttgcatgatgtaatatatctattattccttggactctttttctttcctcctcctcctcctcctcctcctccccctcctcctcctcctcctcctctcctcctcctcctcctcctcctcctctctcttcttcctcctcctcctcttcctcctcctcctcctcctcctcctcctcttcttcttcttctttcttcttcttcttcttcttcttcttcttcttcttcttcttcttcttcttcttctgtttttgagaaagggtcctagggtctcattatgcagccctagctggcatggaactcactattggactaggctggcctccaagtcacagaggtttgcctgcctctgcctcctaagtgctgtgattaaaggtgtgtgctattatacacattttaaaggagaaatctctttaaaggagagatctctcagttttagatagaaaataataagaattaaaattggcccttaccatctgtctggctatcggcatgattttccagagtcctctggctgtgtgggctgcagtatgcctctctgatatgcacacacctcagagccacgtttcaatgctgcctgtggggtcaccttctctcccttgtgagtctgtacagggtgtggtgtgctattgctaggagctactgctagatgaagattcaagaatatttggaaaaaacaaaacctatgtaaatatcactaactaaacccaaattaaacacatacccgcttttgtttttagcttaatcccaaacatactgaactgtccacccctcatgcctcagcctatagagccaaaggtgttaaatacgtttactatttttcttttaaatgtattcatgtttgtctttcatttgctattaaagcatgtatacatgcatgtgtatatcaaaaactctgaatcattaaaataatacattttacatttgatcttagctaaaaggtcaagaggcggtatatatctgttacacatacacacacacacacacacacacacacacacacacacagtacacagtgctggagactgaacccagggtttcttccatactaagcgcatactgtaacactgacaatgtcctcagcctctgtaggtatcattaaaatgactcagtaaatttctctggatttagatttgcatagctatactgaaatcagtagccctgtcaactacttcatgaacatttaaattggtgagtttttgtaatctattcaagcaatttcccctccttgttttacacgttaatgtaacacttagcttcatttttggagttacacctacctcctgacattgtaagtgaacccataaaggggaacatataacctccccccttttctgctgttttgtggtcaagggtttctttgtatggctctggctggccttgaattcgtatagatcctaaaatgtctctatctccccgtactgatattccatgtaggcactaacatattttactgtatatcctaactctgacttataaatcttttatattcaaaatcagtagtttagattttgttcctaatcattcagcgtttcatctgtgaattaaaaaacataaaaataaaattatttgaagtctataatggctttgaaagtgatatctgtatttgcacaaatatattcctgtgagttctttgaagggtaaatcttgtataaaaagaacagaccaaggagcagctaacaccattagagaatttagataggccaaatcaagccaggtcatacaccaagcagagagaacctggaatccacacaccggcctagctgtcttcaaaaccattctctgctcatggattcgatggggcagaaaaagcacttatctcaagggtttgctcctgggcaatggaaaacacactcttaacattcttgtctgcttgaaagcaagagctaggcagcacactggacaccgttgccttctcctgcattatggaagttagttgttggttccttcaaacattgtgaggtggccgcagaaggagagcaaatgtgatgtgtgggggcctctcaactagaaggcaagcctcggtttgtgggcccataggaacagggtttaggcaatgtatttgttttctcaaaacaaaccatttagagagaagttaatgtgtaattgccatctaattatttgctacctctgctgtccaggaagcagttgtaattctgaaacaagtgaaattcatccactattacatgtggctgagatgaaaaaaaaaaaaaaagaaaatgtgtctttggcaccttactctcaaattagccactaatagttcttttaattaataatattcacgttagtgaaaaaaggtgggcttgttatgttccaaatgacaaaaatggactgtttattggtggactcagcactgcctgcaatgtcagtacatctgaggacagaaagaaggcaggatctttatcagagacctggaatggactcctcatggtagagacatggctcagaagagaagtgtgtcagaacctaatcacggacaccgttcccttgagctcagaatcagagaaagacggaatgtatctgctttgtgaatttggacacgctgtcagcaatgactttgattccataccttttctcataacaaagcaaggaaaacagtcccgtcactatgcactgcaaaggaaatgggggaagggtatttgcttcccattgccaggctggctttcaagagggaggaggcaggagggagcccaggcaggagcaccttctgcactgattctgcacagcacggtggactgacccagtgaaggccacagagatagcactggggaaaacaggagaatgggggatgtgcaccttccactcgttagaattacagggttgacagaaagtaagattagtcccacagaagggtttatgtgttcccaaaatagccacatgggggaggaagcttgaaaagatgagatggacacaactaaacgtgtgtggacgtttggaaaagctgagagggtgggaggggaagcaggaggttgagcttttgaatatgtgcgtagacacccagggtccacgtcaagaagagggaaaatgaagatgggactattcatgggcacttccgtgcggagaatcggtggtcaaatcattaatgtctgagtccctcaatagtcttccagacggttctgagaggcagagagggaagggttaatgacactgagggtctactgtcaaaaaaccctctgccttttgtttgagaactttcatttctccctcatatttgcaagagggtttttccctctcagtattttgttctaggtttttctcattcttttttctttcttcaactttctttattccttcattccctccctccccgtgtctcacccaccctcctccctcttccctcctccccttccctcctccctcctcccaccttctcccccttccctcctccctcctccctcctccctcttccctcctcccttccctcctccctcctcccacctcctccccttccctcctccctctcttccttcattcttgccatcatgaatcttttcagcctgttgcacaggttcttgttttctccattttttatttgaattagaaacaagattgttttacacgtcaatcccagttccctctccctcccctcctcccccaccccaccaactccctatcccatactctttttcctccccagggagggtaaggcattccttggggtttttcagagtctgtcatatcctttggagcagggcctaggcccacccccttgtgtctaggctcagggagtatccctccatgtgggatgggctcccaaagtccattcctatgctagggataagtactgatccactaccagaggccccatagatttcagaagcctcctaactgatacccacattcagggtgtctggaacagtcctatgctggtttcccagctatcagtctggggtccatgagctctcccttgttcaggtcagctgtttctgtgggtttctccagcctggtatggacccctttgctcatcactcctcctctgcaactggattccaggagtatttagctgtggcttatctgcttctgcttccatcagctgctggatgaaggctctaggatggcatttaaggtagcctctccactattgcttaaattgttagttggtgtcatctttgtagatctctggaaatttccctagtgtcagatttctctttaaacctataatggctccctctattgtggtatctcttttcttgctgtcctctatttttctcctgactcaacctttctgttttcaggactacaggtctatagtagagcttgaagtcagggatggtgatgcctccagatcctggttcttttgcttctctatataaagttgagtattgttctttcaaagtccgtgaagaattgtgccagtattttgatggggattgcattgaatctgtagagtgcttttggcaagattgccatttttactatgttgatcctacctatccaagagcatgggagacctttccattttctgataacttctttaaattctttctttaaagacttggagttcttgttatacaggtctttcacttgtttggttagtgttaccccaagatattttatgttgtttgtggctaatgtaaagggtgatgtttctctgatttctttctcagcacttttctcatatgtatatagtagggttactgatttttttgagttaattttgtatcctgccactttgctgaaggtgtttatcagctgtaggagttccctggtagagtctttcaggtcacttatgtagactgtcatatcatctgcaaatagtgaaagtttgacttcttctttccaatttgtatccccttgatctccttttcttgttttattgctctagctagaacttcaaggacaatattgaagagatattgagagagtggacacccttgtcttgttcctgattttagaggaatcctgttgattttctctccatttagtttgatgttggctgttggtttgctgtgtattgcttttatcatgttgaggtatgttcctgttatccctgatctctccaggtcctttatcatgaaggggtgttggattttgtcaaaggccttttcagcatctaacaagatgatcttgtggtttttcttttgcagttcttaaaccatggcttgttatcataactgataatgggggaaaatggcaagagtaaaagatctttgagcatgcaatgaccaaaacttattctaaaatccaatacacaagtgcatgctatttctggtagggctcacctgtgttgcattgtgaaagtcactgtagccatggttctgaacacaagacctggtaatgaccatgccctcacagagtgcagctccagtgaatcagcctgaggaaaatttgcagtccttatcacttccaaggtttctctgaatctttcaccgcacaaacacgctacaccgtatagaggtgcttgccccacagctcttagacagtctggtgcagttttgttttgctgttccgcgtttgaaatttatcttgacacatcaagttaagatgttctttcctcagccagggccagctcctagtgagcccatcagaggcattcttcattgctgttacagcattgtttgctgtgccaaactgtgtctctgcatctcttggttattgctcttaccatagtgttcagtcttttggaattcctaataattctctctctcattcatgacatgatctgagtttacttttcataaataacttgtccctcaccgccactcctgcactcacacgtgtgtgtgcgtgtgcgcatttgtgaatgtgtgtgtgtttgtgtgtgtgtgtgtgtgcgtgcgtgtgcgcacgtgcgtgtgtgaatgtgtgtgtgtgtttgtcgtgtgcgagcacatgtgtgtgtgtgtgcgcgcgcgcgtgcacacgcgcgcacacacacatgcatgtgatacatacgtgcaaatgtactgcacgttgagatcagagcacagccttgggtgtttctcctcacctcccatctggtctgagagaggggttttttttgctgttcgtcgggctaacttgccagcatcctccttcctctggcccccatctctctgatttcccttaaactgcagtttttgccagtgttttcatgtctcttttgggctttctcttgagtttatctttgaaaagagatatgaaaatcaagaaattccaaatttatggctgaattaaactcaagttttcatcgttctgaagaagatcatttttggcgatagccccatgccacaagttactgccttggtgtcccctcactgattcccccagccgtaaccccaactctggcccctccctgacttctttggttattctgtggtctcaatgcctttctctatttttactgcaaaactctccctagctttagaacaatctctggtatctttgtcatagagattttgtcccacagtgcatgcagtatcttttagaacaggcaccagaaatgcgcgccatcagctgtggacctctctgctaccgtacaccatagaaggtctcacctccccttcctcctaggaaggactccaggctgtcaagagcctgatccatctccgtgtgtacctgagatggagcgagttggcgggtatcctacagttaccgactttaggtggcattagggaatattgtagttaaatttcttccttctaattagcacttcacagggaacattttaatgtgtaatattaatggaaatagcaaattcacttctgaaaaatgcacattttttacttagtacaggcatctatttaaaaaatatttccctctgattatgtaagattaaaatgaaaccacatctttgtttgttcttctttaagaagtatatgaagaaaacaaaaatttctccagacaggcacatcatagtatctaggggatgcttctaggggtattctcccaacacctctacctctctacctccagggctctgatggccctggagatcttctctgagcatgtcagctcctgagtgcactgaggtcttctaatgcacagctgaatggagctctactgctcccatcagcagaaccactgagtttctcggggaatggccaccaagtgagcacacaagccacatgaccacattaatggcaaacagcccatcaatagtgctctgcagggcttgagatccttgaagtcatgcaagcgtccccttgaggccataatggtaatttctaatttctcccctttctatgctttcctctctttaccctctctttcttttctctcctgttcagttctatcctctgtgtgataatggggttaaggacggagcatagcagtgaccagtgtagataaacaagagttccagatcaggactacagtgatgagtaactacggaaggaagcctgtatggaatgggactgatccagaccccaggaacatggatttctgtgaggaaacttcggaaatctacgggacttcctgtaggagttcagtacttatccctaggataggtgtggactttgggagcccattccacatagaggaatactccctgagccaagacacacaggggtgggcctaggccctatctcaaaggatatgacagactctgatgacaccctatggaaggcctcaccatccagggggagcagaaaggatatgtgataggtagggttttagttgggagggtggtggtaggggaggacgggtgggagaagggaactgggattgtcatgtagatcaatcttgtttctaatacaaataaaaaaaagagttgaaaaaaaaaagaaatatattgggtccctcagcgttaagcaaatatgcttttcaaaaataaggagtagtaaggatttctactgtttaacacagctattaagactacccaggccttcaaattctcttaacggaagcaaaacgagcagtaagtgtgtgtagttagtaatggttacctttttatgtattcgtattatatttgctttatgtcagtattatatttgctttatgtgatatgttcatatcacatatgctttagtgaatgcccagtgatgagtatatccttcgagccgagtgctgtagctgagaaatggccatgctgtttctaggtcctcagcagaggaatcacaactgggtacacagtagcctcccaaaccgtggcagcctcagggccacactctatctgctaacagcagggcaattacttgctgaatggggtttagtaaatcccctagtgcaagtacgcctggtagctggtagctaggatgaaatgtctgccactgctggttcaacaatccccaccatggcaaatactccactcagttctcaggcccactgttacagtcattggagctctttgcctctgtgttttcttcttcgagcttggtgcacaagcacacttcaggtggcgtttcctttgccaaatgtgcatcttgcagagttcacagattttaaacctgaaaatggttttcgattttgtcccttttgtgataacctgtgacttctgtttgctgagagacttgagtgacttctgtttcgaaaagaagaaaggcgaagcctctgaactagcctgttcacctctgttcattcccagggtatgcagcttccaagtcagcaaatgactgtctcttagctggtggaacctgacgttggaacatcagtaactggtgggagaaaccatggtgtccatatccagttgcatagtctctgcggttcacagaagtgtgttctgagaggaagcctcaataacaaagacaagaaaatgttagactgcagggtccctcaggcattcaggaaacaaaggtccatgtaggggagccgcaccacacacattctgagacgcgtgtggcaggtgctccgagtaagcaaagcatccttgactttcaaatcagttgtccctctactttgccacccagcacttaagcataagaatgaaaacggaggagaaaggagcctgctgatagattgttagaaatatggaatagttcaaaatattaatgtaaggctaagggtgactgggtaacaaatggtagctttgctcattgctcagcctgacacaattaatattctaggtcatgcttaagttcccatgatggacgacagtctgaaggggggaattcaggacaaatatatatctattatataactcattgcctttttttgaccactcagaatcatagcctttaaaaaaatcagtcttcacacctcatttgccgtcttcaccacggggccaccagtcagcagccgggcctgttgcaaggaggtcagtgggaagctattagcagagtcccctcctgagagctcctaggccttattgagttgaatgttagcatgacagtactgcaaataactcaggtgtaggctttttctttttctttctcttttttcaaacagttagcacagatttccccatagtgttggtcactctaggaaattattgctgaaaatgaagtccccaaagcaggcatggcagtggcccttctaggttgtgaaaaatgggggaagtagaaaaaatgcccatgtcccttaggagttcctgtggcttctgtgactcacagcaaaccattcttcttaaccagctctcaggtatggaatgtgcaattgagactgtcatatattctaaagcattatttattgaaagaaataataattaaaatggccactatggcaataaataggtatttgcttgctatgggaagcccacaagggccactctgcttttactgagataagttagctaatgtaataatttctaaaatactgacaccttgaagattttaaatgatacatttgaaattcaattaaaatatattttctatctatatttgatttaaattgcaaagagaatacacatgaggaggcctctatatagttgcaaagtataatttaagaaagctatcatgtctctcaaattgcatttcccctcttgcctatgtatacacgtgcgtgcaaatgcatgaggagatcaagattcctagtggggcagagttaatgtagatgccagccgttattccggccaacagagattttaaatggtaaattacaacctttagctaagttgtatgaatctcacaacttaatctataaggttgtggaaatttgagcagtaaagtaaattaacagatttccaattagactgccaccaaccaaaatggcatttattctcttttatctttttcagagagcatatgatgtagttaactgtcctagaaaagcttggcatttctaaccaccacttccgcaagtgttggttcgtatcccacacccaccccagccttgtccccagttcttcctttctgacttagaggtaccagtctgctccaccatcatccattacttaggtcactatttcagagttatcgttgtgtttcagttttccacagcaggcaagtggagagcagggcagtgctttgggtattttggcaaccttgatgtctaccaagatgcaagatacacagcagacactcataaatgaatttaaacacttggctgttcagaaagctgcatcacaccatgctccaccctaactttgcaaagcagagaaagctttgcatgagtgaggacttgagactgaagggattcccggatgcgactccttttcctaacacattgtgtagtgatcagtaattcaaatagtcaagtatttattgagtacataattaatacccccaaattattcaaacattgcacatttgccttcatgtaaattatggcatggcttacagataccatttaaaacatatttgttaagaatacaaaatggatggcttaagatccctctgttattttccatcaaatacaatttcagactgagtttttaaaacatatttactctacgacccggaaagttgctaagattgttggtctaaaccagatataaatggtaaaaattctaaattctcctctggtaaacccaaccttgattaaaccctgaagttgaaatttaaatagtttctcccttttaaatgaatgaaaatttaatttcatatgaaaattaaggaatctgtgttcttctctagcttccaggtatatacaattcacctttccggaaacaacctgacccatgggaactgcggttacagaaggcaaagcctttaggacaccaaccggccaccatggtgaagaccaggtcccgctgtagcttggccaactggctggaatgcaccagcgcccgatccttccctccctcggcaagtctgccacctatcgacaggaagcggtgtcaggtaccaagtggccccatgtgaatctgtcccttttatcctcactcttctcctagcctcttcctgtaggaaagtatgcggagtatgacatctgttgacatcaccgttttcttagcgtcaggtttattaacgctgttggctgaccagagctgtcacccacataccaactctgtcttgccaacctcggcctctgcaaagaacgctttccatttccctcttcctgtgtcccatcgtggcctatttcacttatcaaagtgtgcataaggcccatcacactacgtcagagtgtcatattacatacacatacacctgtgcagatcatataactccatcgtatgtatatgcccaactgttttccattcatggctcaaaagacatgatcactttcatgttagctacttaaaaaaaacacctcacaaacctgataccatgtttttgactacacactatacactactaagtgaaatgggttacaagtcttttcttccatcctgtggggagtgtttttactctttccatggtgctgtgtgattgaaaatgctttggttttatgaaagaacagacctttcttataaagacttaactttaaataagaaatatgtcatgttcaagatgttgccaaaagaagttcggaagcggttccctggtgctgggcattgtgctgagcgtggcttcaggtcagggttgctgcagaaatgccgggctcttgtgtgatttgttacagtggcacctgctgcaatccattgttgctggatttttcatgttcatgtgttgtccgactgtaccatttgaaacataacttgcgtttaaataatttatgaagtgccagtgtgcaatgtggagacactccagagactcacaacacagacaggaaatcttgactatgcccggactgtgacagggttagggaggaaaagtccttcctgggctgcagggccaacttagagagaggaaaggatacttgtcatgatcctaaaagtcccagaagggacaactctgaacccttcagttactcagctgaagaagtcatctaactgtggctagtatcagtctgcaacagggctgggtttgactcattggctccccacacaggcttgcttccgtatatgtgtccttgaacagtcaattccagaaatagaaaaaaaaaataatgtctgaaaccaaagtgaatttgccttttcatagcatccctgggttactgcctctgagaccagttttctcatgactgtagtcaggggtcagagatgctgcaacctcctctgaaggcttgaatgggttgtaaggataggaaggcaaagagatccttcatcctcacggctagttgttgccgtgttgtctttcctcacagtgtccatgccacaaagtggcccccacagcatggcttcaaagggagccaccctagagaaagaggggggaagctttcaaaacagaaggcagaactgatatcccatgaccattgccctattctgtttattcgagatgagtaggcctgtttccatccaaggacaagcgaccactcagaacagtgagtagcatgaagcagggcctactggtggcatcttagagactacctttccatgcctgatactgggttggtctctcagtaagaccacctgcattctacaatgttaaatcttcctatatagctataattatctgtggtatatatctgttgtcttttcaattgcctttatttaaatattttcctttcaaactactaacaaaataaatactattagctgttatttttatggcattttagagggaatcatataactgatatagatatggatatggatatagatatcgatactatttttacttcccacttcttcctcttttttcttgcttttctccaatttactttcttgtcattttcttttctctcctttgcctcacgcgctctttctcagcaatgtcatactccttatcacctcctttcttcttccatttttaactttattcctttcttttctagtcttgtttctttctttgtgtcctcccttctcgctttccttgtggcttcattttcattcacagtaggattgttgtgtaatcattagctgagcaacattttctttattcaataacaaaaggctctatattgactgtgcagataccaatgtttggacacagcatttggaatttggaggatgatttcttgaatgtatgggacaactctacttagttgaaacttttattaaactttgacaaacactttaaaataaaggataactatgcaataacattgattgtagaacagaaatgcatttgattttcataaccaagacatggatggaaacaaggcaaaaataaaccctatgaagttacagctgagaatacaagaagtgtgtgtgtgtgtgtgtgtgtgtgtgtgtcttccaacagaggtttaaatagcctgctgaccctgtcagtcctaacttctgaatttttatttctttgacgtttctattgtccaaaaaccttttaaattctatttttgaaacaaataatcatcctgccacttttgagatgtcatatttttaatgccacactgagtgctatactacacttcctaaaggaaacccaacttatacttcttatctgactcacacacagtaaaaacaggaccacaaaagtgactggcacttattatacaaccaaataccaattcttcaaccattgcatttgtcaaagagcaaaagagtccaatttaagactcttgatttcttgcgaacagattggaatcgtgatcgtgtgtctttaaaaagcaaacttccaatacaaatccattaaccaccttcaaatatagcaatccgcctgtccagctgtggaaagtactagatgatactgatctgccatttgtgttatttacggtccatgacttttatggtaactggttcctattattggtttctattaatgtaaaacataagtgaacataaatgaggcgtgaatcatttctttttattagccccacagtcttcactcagtgcttgcagaagctccagctgcgacttcttagtaataacccaacccatctaaaggagatgtttttaagaataaggaataagattgaaaatctttgtccattttgtgttattcatctctaacacaaagattgtgtgtgtgtgtgtgtgtgtgtgtgtgtgtgtgtgtgtgtgtgtgtgtgttaacaacacagcaaatgcccaagctgctgttggctcaactatgctgatcatgctgctgctggctggccaaccagtagactgtgatgcccagtgtaactccttatcgtactttacagaggctatgcggagagtcacccaggttcgtctgtggactctttactctctcagctgtagccctgaaagactgcccttaattccagagccactgagtgtcagaattcagtaaaacaagggtggacagtgggtatttgtgtttaagaaaccaagtaaataaaagattaggcacccacataaaggcttttgtttaaaaatataagaggacttttggaaagttaaagctcattatctcttcttgtttttactaacttaaaaagcgaaagtgcacccttcaattgtgtgtgcaagaagtgtgcctgtaaagtttcaatacagagaaacctagaactatgggtttgctagcccacagatgacaaccttgacatgataaggtgtttctgccagctctgaaacagtttgaggacaatcactttcatgagggagaacagttctaaaagataagtgatattcttttttgtttgctggttggttggctttttgagatagggtttctctgtgtagccttggctgtcctggaacttgttctatagaccaggttgtccttggactcaaagatctacctgcctctgcatcccaagtgctgggattaaaggcgagcaccaccaccgccttgctgagcttcttgttcttttatttgcttgttttatctctgagaaaaacgtttttaatgtacttgttatattttgtaggaatttagcaccacagttgtcgatgtgtctgggactcttccatagtgaaacacatttatcctcctgtcttgtcagggacccttccgagacatgaacgaagtcctgcatcagcgttacaagcctttggagccaaccctgagggtggcagaacccatcaaccacttagagctggccagagaggtggtgaagcaagaggagcggatgctcaacgtgaacaaaatgtgagcgctgaaatctcccgcgaccccacttcctagggacacctccctctgtgtgcagaaaagtcaagtcactctgcctattcagtggccgtcggtttacagcacaggatgttgtaagcgagggcagtattgatggtagaatgtatacccaccagtcccaggggaaatgcaaatccatatgccacttccctaaaattgtatttgtgggtgcacctctcaaaggagatgaatacccgtggtgctttcagagggaaaatgacagctgtgatagtgtctgaggctaacatcttgaagtgtttaatgaattcatatttatttacgatgctttcaaaataacataatagagcaagcacatctgtggatgagctgtgtttgaacatgacagtcaatccaatttcttaaataaggtgcagtggaagaggtaagttcagactgaggagaacaagtgaaaacagaggccaatgtgtcaggatattcagtgtaaattattttaatagcattagtgacttaggccttaacacaaaacatctttctctttatgttccctttctcttatggtgctttgtccacattagactcacgtgtaatttataatggaccattgtaaaactagaatggtcttaatgttattattgttattatcctagagtgtctcatgtaatcattattgcagtgtatcttaacagtattttagcatttcatgtacgaaatgataatggtaggaatacaagtgattttaattataatgtaataatttagtatgatataagttactactataaattcctatataatagcatactataatatataaaatgccatacacaataactactaaccatgactgtatgttacatggcaataacttatataatagtaattacaaatgcattaaaatacattgtataaagaaacaagaaggcaatttcttcttcataatggttttcaatcattttatcagtcaagacatatacatttgactctttaggataaagaatttttaaacaaatattgaaaaataaaaatgtccacaaatggtcatgcagccaaaggaattgcctagattttcattttagagacactattagtcaagaaaataactatagcacctttagcagattctttctgtatctgatcaagtcaacccagtatatcaaaaataagaaaaaaaataccttgacctattagttttgagagaaatacatatatttacctcagaaattacttaagattctttgactcaaatttaggcaaaatatatagcttagtcatgaatacatacatacgtaaaggtatgtcctaaaattcttttgtttttgttttgagatggagtcccaccatgtatcccaggctagccctaaccttgccacttcctttcttgtccttgcctgtgctggtttcaggtgtaccactgtgcccagctcagaattatttttccattttcaaaaatgcaatgtttatgaaagggaagactcactaccaaaataattgatactgtaggttattccactgacactcatggagaagtctgtgctgctcagatgaccatggttactgtaggttatcccactgatgctcatggaggagtcagtggtcatcagatgaccatggttactgtaggttatcccactgatgctcatggaggagtcagtggtcatcagatgatcatggttactgtaggttatcccactgatgctcatggaggagtcagtggtcttcagatgaccatggttactgtaggttatcccactgacgctcatggaagtggtcttcagatgaatcatgatgccttctcttagaactttcttgatcagccttgcaagattaagcattagtgttatctccaaaggaaggtgcttggaaactccccacagaccacctgtaagtaacatgtgtccacatgaaaggtcgggaagacctttcatgctgaagcatttggaaactcaacaggatttcagagattagcaagcccataagaaacaagctaagttagaattgctgaagtcgcactgagaagttcagagcacttactctcagcttatctaagcagttgctttctatagttaacacaagattcattccattgtagggggtttgaaatactgatgctttgtaacttattgcaaaactattgtgtttttgtataatggataacccacaactgtatcttgtgtagaaatattagagataggctttatatctctgttgatgataatttcatgatgaaatcatagaaagaaatttacaattacacagagatgtaactgtggaggagcctcttcctacattaacaaatcaccagaagccaaaggcaggatgcatgtcatcagcctaaggcttgtttaatgaccatctgtgtgtcagtcggaaaaggcagagctttatctctgatctcaagggctagaggtgtagcactgcaatgatatacagtgcattttgctttcatgtcatcatgaagaggacattgcattttatcagcaggaatttgaatcatgcaagttcaaatcttgctgcatcccactgccgacatcagcagtatgcccttacaactcttaggaaagtaatttcaccatgccatgcctctatctccttgtctgtcggggggatagaaatattaccttaaatgattgtagtgagggctagtaatttagacagatctaaataataaataaatattaattatcagggctggaaaatattacttagtgggtaatatttactgcataaacagggaatcaaagttcaaatttcccagcacacatacaaaaaaggtggccatgtgcatctgtaaccccacattgagggacataagggaggctcactgaggttgttctctgatagtctagttccaggctcagtgagacaccccatttcaaggaaataggcagaaaggacacccagtgtcttctcctggcatccacaaacacacataggtgcacacacccacacacacaacacgcacacacacacacacacacacacacacacacacacacacacacaaaacacattttgctaatgctacaggtatacttctgtacagcatctatccacgacataggaggaaaaagtcatgaagtcacattacaaatacaggtttggcttcagacactaatttaccagacttcagaaactttcaccactcattacccctttttaagctcaagaaatttttatttgaccctacatgactaaatgtgtacgtatacagataactgatagtaaatcacaacataatttattttaagataattttatatatccaatttaccatatgttaaaggttaaacaaactggatatagtaagatggaagtacctgtttatttttatttaaagaattgagtcttggttgaatatttgaatatgcaagaaacagtaccttcagcatttttccaagctgattggcattttgatttttgaatcaccagtgcagaccttacagttttgcataaatgcataatacaaaatggcagaagtctatttgaagccacttcaaaaaaccattgggaatgatcttaatcgtggaacattttaaaatgaaacttagcagcaactgttgtagcatcttgctttgccagtgactttgtggttgtgaccacattgtccttatgctgcacagctgtttaaagaatgtttaaattatatttggggaagcttcagtcagtaagcaatatatgtttctgagaattacagatgatagttacccatgcttcttatacctaatgatgttagtcaggttcaatgtgtactcagagatttatccagcatagatatttgattatcaaacacttcaaagacctacagaatatggcatttaaatgttttcttcttggcaatactggccttttggtcaaagagctgcccctgcatcgaccattgactttggacatgctgtcctaactgggctagcaggagataaacttaaagagactgctgagccttcccaagtgagggtaggacagtctttcaattgtcctgcttctgagatggcctgtcagatactctaggcctgagccaaagttggtggccctgatgttactgtgagaccttgggtgaccatccaggcagcctgctgtttctgtcatttcttgcacctttaggaagtcacccacttgcacctcctgcttacccaaacaggtctttgaagggttgaagactatatagttacagctaatgtcctttcttatcttagctagagcatattaggtacaagatttagactttccagaataggacagctatcggagtaatctctgttttatgccattgccctgggactggacatctagtatgtgtttcttgcttaattatgctctttctggttgcacgtctgaatttgagtatgtttttacctttccttcttcttgactatacttgatatctgttatcattgtatatagttttgtatcgggcttaaaaatcctcttatttatacaaaaaaaggaaatgtagtagcatcttgatttgccagtgaccttgtggtggtggccctaccctaggggtgtggtttcaggtgttcagatgtgaccccttaaaaggtagaggaagggctgcctggctttcttggggtttggagagagcatcagaagggcagagactgttttctggagcaggaatactgtggcggttatttgctattattcatgtaagtgcttccttagtaaactcctaattatcatttatcttggatctggtagactcatttaacccaccccgcttcaagcaactcacacagtcatcatcacaatcaagcattttaacacaacacactgcagagatgcatgcactttatacttgcacctagagaacttcctgtacacaagtaggacaattctttgttttcccaagcccacagtcatgaatctggagaggagactggcagtgaagtgggggttgctggagaagggaggccaggcaataaagtgaggagaggaaccagagtgtgtttgtgtacatgtgtgacattgttaacacagttagaaaaaaaaaagtttggaaggaggccaaaaagggccttgttttcagtaactaaaacattaaaatcattgtgacagtttaagagtggaaaactttgtaggacaggaaacaggttgcagttcataagagaacagtctcaaatcaaagctgcgatacctcgagcaatgtttgttggcctccagtggcgtgaattgaggtggatgggcccaccttcaatgtgggtagttcctctctgtggatgtgggtcctgaaatgacgtaaaaggagactgtccatgaagtgtgagacaatacctcacgtgactgctgcctgggcgcccccaccgcaatggactacatcctccaactgtgaaccgggagaaacttgccttcttttaccctccggtgagggtatttgccacagcaataggacaagataatgatgcctttaggaagaaaccctgtgctcagggaagctggtttggaaaggatttccgtagtgatgctgggaggcagtggctcagctgacggcagacgtcagtctcacatgaagagagtctgacagtggactcagctgacggcagacgtcagtctcacatgaagagagtctgacagtgggctcagctgacggcagacgtcagtctcacatgaagagagtctgacagtgggctcagctgacggcagacgtcagtctcacatgaagagagtctgacagtgggctcagctgacggcagacgtcagtctcatatgaagagagtctgacagtgggctcagctgacggcagacgtcagtctcacatgaagagagtctgacagtggctcagctgatggcagacgtcaatctcatatgaatagagtctgacagtgggctcagctgacggcagacgtcaatctcatatgaagagagtctgggagttggtatttctgtctgagacttcagctaccacatcttggccaatggttttctacatgtccaaagatttgatcgtgcattccagaattacattttcagctatctcttcctttgtaccttaccatatgtctaagacttagtgcctgacacaccggcctccttgccctcgacctgaatgtgaatttgggccccacctgcctgctcaaggtgggctaaggctctccctctcctccagcaccatagcctattagccctgaagctctgcgcattccatctgacaagaagctttcaaattcaacccttctttttactttgattgttaatgggaaaatttgcattttttattttaatggccataaaataccatctatcttacccacccagttttactaatggaattcaaccatactattttattgagaccaaaacctttctatagctttttatgaaaatatttttcatacaatatattttgatcacattttcctcccccaaatcctcccagacctgtgcatgttcctacccactcaatttcattatttttctctctcccttttaaaacaatcaaaaatacaaaaggcccccaaaagcacaaaaattaaaattaagttaaacaaacataaaacccataagacataaacaaaaaaatgccaaagccaaaattatacaaaaagatcacaaaaattccattgagttccttttgtgttgtccagctactcctgggcatggggtctatcctggagtgtgattgatttcctcagtgaatctttactggagaaaactagttctccctgtgtcaataggtattagttgcaaagagcttcttgcttgggcgtgggaccctgtgtcctcttccacctctcagtcctgggacctcatctggcttgaacctatactgacttcatgactacttatctaccacagtctctgtcagcttatatgtatgtcaaccctgttatgtctggaagacggtcatccaccacttctggctcttacaaaatcttatagattctcctgtaggcccatgacctatttaatcacaggttcctggctattttagcagtgttaggtacaggttccatgtcatagagtgtgccttacatacagttaaaaagtggttggttcaggcaaatggacagaactagaaaaaaacaccatcctgagtgaggtaacccaaatcagaaagacaaatatagtatgcactcactcataagtgggtaccagacataaggcaaaagattcccaacctacaatccacaacccccagagaagctagaaccctcttccagaaacagatggaagcagatgcagaaattcacaactaaaaccaatgggccaagctcctggagtataattgaagtgagggaggagcaaaaatatgaacaaaggagtcaagaccatgatgaggaaacccacagaatcagctgactcaagctagtgagagatcactatctcaggtctgacaaatggggaatctgcataaaaccgaactagactccctcaatataggtgacaatggtttggctgggacttgagaccaatgacagtgggtccaagatctaactctaatgcacaaattggcttagtggagcccattctatatggacagatgccttgctcagcctcgacacagggaggggtgtgggggtggagatgtgccttgctccagcctcaacaagatgatgggacagacttagtggacttcctaggggaggtcttaccttttctgaggagcagagggggaaccagaggagaagagggagagggaactgggattggcatttaaaaataaataaattaattaaaaaagacctacaaaaaagtctttggttattcctataacatttgtgccatcatcacaccaatatgtcccgcagacaggttgctcttgtaggtcacagagtttgtacctgagtaatattgatgattgcatttctcctcctgtactatgcagagtatcttccagcaccataattgctaatcaaataagggcgaagtttttagttgtataccatctcgacttctctgtgtttgatgacatatgttaagaattgtcttttgtaataggaccttaccatcaggttgtggagagcaaccaatagccctgacaataacctatgacctttgctcatttccatggggcccatatggccaacaacaggatgtaacccattcctggcactgaaggtttcacttggcggcataagttgcctagttagggtattctctcccctattatttggtgactcaatttagattccttccatgtgcctgtattttaggaagcttctacaggaatagatttccatatggtttctcaaatgaattttagtgttagttgtccatccccatattccctcccttacctttctttcccatccatccccctatggaatcctcctattctaatttcttctttgtgtgttcataacaataaattctatttctctcttcttgggagagcccccactagtccttactaggtacctaacctctgtggttattcaaattgttgcacaacatatagaaagcttaccacaaataagagaaaacttaacagtatttattggggaggtctgggttaccacactcaggatttttttatgtctccatccatttacctgaaaatttcataatttcgtattcttaacagatacaaaacattccattgtgtaaacataccacattttctttatccattcatcagttggtggacatctgtgttgtttccaattgctagctaccatgaatagaaggcagcaatgaacatggatgatcaagtgtctctgtcatagtgggtggagtctttttgagcatattgagcatatgctcaacagtagtctagctggatcttgaagtagatctgttcctatcttcctgaagagctgccacacagatttccatagtgactacacaagttttcactcccagcagcaataaataaatgtttccctttccccacatccttgccagcaaggttctatcctttgttttattgatcttggccattctgtctgggtgaaattgtatctcaaggtatttttttatttgcacttccctgatgactaagggtattgaacatttcttttaagtggttctcagccatttgtgtttcatgttttgagaattctgtttagttctatactctgctttttatttgggcactttgttttgttgctattcagattttgttgttgttgttctttatgtattctaaatactcactctgtattagcagtatcactggtacagatctgttcccattctgtagtctgctgctttgttcaaaaggtggtttcctgtgctggaaggagcttcccactttgtaaggtcttatttattaattactggtcttagtgcctgtgcagccagtgtgctgctcagaaagcccttccccatgcccacgagttcatgcctgtttccagctttcacttctaacagattctgagtatctgctcttatgttgaagcccttgattcatttggagttgggttttgtgcagagtgataagtatggatctattttaattctacatgcagctatccagtgtgatcagtaccatgtgttgaagatggtgtcttcttccccagtgtggattgtggattctttgtcaaaagtcaggtgcctgtaggtgtgtggacttaagtcctcctcttcaatttgatactattgatcaagatgtctctttttggtccaaaaccatcctgttttcattagtatggctctgtaatgcagcttgaaatctggggtggtgatacttgcagttctttttgttacttcttgtagctatcctgtgttttttttttttttttttttgattgtttgtttctataagaagtttagggctgtttttcaatttctgcgaagaattgtgttagaattttgatggggattacatttaatctgtagattgcttttggtagggtgaccattatctcaatactaatcctaccaatccatgagcaggagattattctgtcttctggtgtcttcagtttctgtcttctgtatcttagcatgttcattatacaagtatttctcctccttgcttagagatataccaatatagtgggaaattaccaatacagagtcaggtagaaatataagggtatttaatagggaaaagccttacttacagagcgacctagctagccggcgtggcagcagcctgtacagcaagaagcaaagtgaaaccaaaagagcaaatgcagtcacactatgtcactctgaccacgccctcacaagcatggtcagccacacctgtagccagcccctaagtaggcgtggctacagcttctcctacaattccccttttagtctaaaagaggattaaaacttaacagtttaaagtatccaaaattaacaatcataaaggtaaaatataagaagatacaacaatctgcttatgtcacatcctaactatctatgttaactaaaccctaaagtcatctgagagaggtatccaagcctgaacacctccttccaatcccaaccataaacaataggtagctatccctaactagttatatacactatcctaagtgacaacaatggagaaagggggcgtagcatcctccaagttacttcctgctgaaatgggacgatgatagtcatgtggtatcaggtaggaagaaaatgttagtatagtgaaagtcttgaatgaattgtatccagtccatgttagatgggattcacttgattgaagatctcgcttgaaatcctcaacttgattgaagtcagtacccaaacctctggccagagtgtccattgaaatggagcaagttggatccagtgcagtcaaggaggtgtggcccattttctttccagggtgtccagggattgctgtcaggcaggtcttcattggctgtgtgggactcaaacataaacagttagcagagaaatgtttgcttgtgtatgtacacatgctggggaatgcaaccatgagagcataacaattatgagagggtgtacaccttgagagaaagatctaagaaaacacaaagacagtccccaaattcttcttttattctgaattacatcaattgtcttcttgatacaacacagaaacactaaagtttagttaaataacgtgcttggattttagaggaggaaagccaaatccacctctaaacccagcattggtttaattgaatagggactaggaaataaagagaaatagttctcagagagacagctgtaaagtttaccatatggcacgttccttttgtttgatggttatagctaccttttcttcccaagtatctacccatgcagtgtcctttgccttctggagatgagttttcctgtgaagataaaagcaaaacacttccctttcctttgggaggtttctatttagtttatgagatataccttagtagaatacctgccttttgtcctcgttgagagtttttccttttccacttgaatcttgatcaactttgatggtatccaaagtttttcttctcctgtagaaaccaatgcaaaacccctaccccaacgtaacacatgtcctggtttccatacagaggttagtacatctttgaagtataccggctgattgagttcagcagttttctctgtagtctagtgtctttctgcagctgtttgtcctttttcattggcattaagaaagtttagtgttaataaagcattatgtaacctatgtttcgggggtttagtcttccaagcttgtttgttgagcatctccttaagtgttctattagatcgctcaaccactgcttgtcctgtaggattgtgtggtataccggtaacatgctttatgttataatatttgaaaaattgttccaattttgtagagacatatgctggagcattgtcagtttttatttgtgcaggtatacccataactgccatcacctctagcaggtgtgtaataacagaatcagctttttcagagttaagagcagtagcccattggaaccctgagaatgtgtctatagtatgatgcacatatttcaaatttccaaactctgcaaagtgaaagacatccatctgccaaacctcatttctccgaatgcccttaggattacaacctgctggcaatggagtttgattataaaaggaacaagtaggacagtttctcactatctccttggcttgttgccaagtgatggagaagtcctttttcaaacctttgctatttacatgtttcttatgatattctgaggcttctagcacacttccaattaataaacgatcaatctcatcattgccttgtgatagtagtcctggcagacccgtatgggatctgatatgtgtaatttatataggattacttctgtttctgagagtttcctgtaattgtaaaaacagagaagttaattccatattatcaggaacaaattctgcagtctcaatgtgtaacacaactctctctgcatattgggaatcagtaactatattaagaggttctgtaaaatccgtaagtaccatgagaattgcatataattctgccttctgtacagatgtatatggactttgaactactttacttacctcacctgctttataacctgccttacctgatttgttggcatcagtgtagaaggtaagaactccagaaatgggagtttgtcttacaatacgtggaagaatccagactgtcttttttatgaatttaattctgtcagttttgggatagttgttgctaattgttcccaaaaagtcagtaagagctatttgccaatattcattatctttccataaggaagaaatttcttcattagttaaaggtactataatttctgctggatcttttctagtcagctgacgaagtcttaatttaccctttaaaatcaaatcagaaatattttctatatatgtctttaactttttattctgtttatgtggcagaaatatccattccaatatagtgtcttccctctggatcagaattccagaagggtattctctggatggcaagataaccagaatacagtctaaattaaggtttaaccgatttacatgtgcatccaatattctgttttctacccattgtaactctttttctgcctcagcagataatattctaggactgtttaggtcattatcacctttaagggccatttttaaatgctttaagtcatgtccttctacaccaataatcgtctgtaattgagaaatttcccctaataatttctgaagagaattaagagtttgataacgatctctcctaatttgtaccttttgaggtctgattctttgtaagtctatcttgtaacctaaatagttaatagaatctcctctttgtatcttttctggggcaatctgtaacccccaacgaggcagaacttccttcaccatttcaaacatatgttccaaagtttccttattagaatctgataaaagaatgtcatccatgtaatgataaataagagattgtgaaatttcttacgaattatttccaaaggttgctgtacaaagtgctgacacaaagtagggctatttagcattccttgtggcaaaaccctccactgatatctcctaactggctgtgaattattaagagttggtacagtaaatgcaaatttttctctatcattttctgtaacggtattgtgaaaaacagtcttttagatcaatgactatgataggccatcctttaggtattaaggaaggtaatggcattccaggttgcagagagcccattggttgaattaccttatttatagctctcagttctatcagcattctccacttacttgacttctttttgatgacaaatacaggagaattccaaggactggtagattcctctatatgtccagcatctagctgttcctgtactaacttttctaaagcctctagcttctcaaaggtcataggccattgtcctacccaaactggttcatctgtaagccacttcaatggcagggcctttggctcctctgaaggtccatcatttgtacctactttctgtacagcatggacggttggtaaccgttttccatagcgtcttaccagatcttttctactatctaaagattgtacataatttgtatctgacactggaggaatattaatctgagtattccattgctgtaagagatcacgaccccagagatttatagctatatctgccacgtatggtttcagtatccctttctgtccttccggtccaatgcagaccactgagttaacactctgtcgaactctagatagagttccaattcctaaaaattgtacatttgcctctctaagaggccatttctgaggccaagacttttgagtaataatagttacatccgccccagtgtccactaagccagaaataactttattattaattttcactttcaactgaggccttttatcattaatagaagcttgccaaaatatgcgtttctcattttgtccattcacacttgcatcactattcaaaatgccatctagagcagtatcttttttcacaacaggcaatgatctatctattgttcctgtgagagattgtctcccactgctactgggaatgacccgacctttctcgatgtgggggacttcttgaggcccccccccctcagggtttctcgaccttaatgggtttccttgtatgtccctggttgatctacattcattggtccagtgtctgcccttaccacatcttctacacaatccagaaggcagtggccttccatatgaggcattgttagaatttgtttgtctacaatttctcttagtatgtcccattttaccacagttgaaaaatctaggttcctggagccttcgtggtctccaggggaaggctcttcctccccaaggttctggttcatagtaatagtaacctctagcttcttggtacctatgttgacctctgtaaggtgcttctccttgccaagcccttacatcctcacctctagaacttttaatttcctgttgcctttttaaaccttttgaaatggcttctcctacccaagctccattatcttgtacattataatcaatgttggctacatacaaaacccattcttctagcggagctgatctaatctttaaaggcaaaagtattcttctgcatattgggtttgcattctcataagctattgtatatataattgattgtcttgtttctggatctgttacctgtaattctactgccatagttaacctttgtaagaaatctggaactgttctgtaggtccctgttctattctggtataaacttctaggcattctcctggcttacgaaccttatcccaggcatttaatgctgctttcctgcatagagacagtatatcatcatcatattcaacctgaacctgtgggtcagcataaataccctgaccaagaagcttatctagaggggcttcaaaaccttcctttatgccctgatgctcaaggagctttgcctgttcccttactaatgccttccactggatttggcatgaattctcaagtacagctgctaccaatccttcccaatctgtgggtgtcaccctgttaaaggttgcccatgaatgtaatagctgttttacatatgggctatggagaccatgtgagacaactgattctttaatattcttaagatccttcagctgtataggttgctattcataagccatccgtccaagagggtgtttcttagaagctggcttttctaccatggtagcttggtacactaatggtgtacgagtaacaaccttagaaaaatagtcatgatacctgggtggagtaggtgccttggattggagtgattctgcttctgaggcatcccaatgatctttaagcctagcaatgatatccttttgaaaagtttcaatctccttaatcataaaagattccaagcacattagtgaatctgtaaattgctctaactgctcatctccatgtttttctaggtctttaatacgatcatacttaggcagcatctggatggcatggaaactgccttctaggtattgcagtctattctagattcgaggtcatgatttgctgattttgagtcctcagcaatcgaccatatggacctatgtaatctgtcagccctgtactgtaaattatcttccaaacatttaaatctagactcaaatttctgatctgctaccttggatgcttcaataactgattgaatggcattgtccaattcttcaaccctatgctgggtattttgcactgttgcatctagttgatgagtaacattgcctatctgagtttctagctggctacagatattctttagctggtcatggtcttctgacagcctagcctctaaggcctcagacatggaggatctctctgtgtttatcttatcataaatacgctgcatctcatcagacagttctgtctttagtgtattggacacagagccaagcttatcatccaatttctgttccacttgctgcacaattgtggtctgacctaatctgttctccaaaacctcactgcgtaaagctgttatttcctgtaaataggtggtgaggttatccttatccctattcctgagtcctctggctagtaatactatttgtaccagcaagctaactgccattatggcatataggccagtaattggcaaattagcatcctcctcaaacagtgaattcacgtaataagcaaaaatattaccaattttagcaaatgataaatattccaccataattttacctgatttctacttcagatgcagtaaatatatttggccagcaggtagcacaggcgttcagttattccgaggcgtttggcagcagttggtcagtggtggagagaggtcacaaaagcagctgcgcttatcttacagggtatacggtcttgcggcttcaaccactgaaacagatgcaactttaccgaagcagcggccaggggaagcctctgctgaaagccgaggcctacctggactctaggcagctagaaactgtctccgggctgggtggatggttctgagcagctcagcaacagcaggttggctgctagccgggaacgcctgtggagagagggcgctttccgggcgtaggccgcgggcccgatggaacccacagcctgtcccaaatggggtgtaggtttccaatatcccacttctgacaaccatatatagtgggaaattaccaatacagagtcaggtagaaatataagggtattaaatagggaaaagccttacttacagagcaacctagccagccggtgtggcagcagcctgtacagcaagaagcaaagtgaaaccgaaagagcaaatgcagtcacactatgtcactctgaccacgccctcacaagcgtggtcaggcacacctgtagccagcccctaagtaggcatggctacagcttcccctacattccaagcctaaatctttaagcacataagcctgttaaatacatttaaaatccaaaccataattgtatccagaacctccacaaagaaggcaaccttccaggacctccatctgagctcagtgaccctcatctcagacttctgaccttcccaatcttattagtaaatttgggtgtttaccaaaggtacagtaatttgtaatagtatcaaaactacataaaatctctccctaaaggggttcaaatcagggggaggcccagattaggtgttgagattaatcataaaactaaactgaactttagggatcctttggtaacaaggactcaagagtctttcatagctttggggtaaaagcatagaggatcactgttcagaatattgtagacaagccatgttttaaatgtgtgcacatctttgttttagactctgcatccttgtctgggacgattgtgatgatatattgtttatgatctaataaagcttgccagtagatcagaatgcaaagctagccacagccatagaagctgggcagcggtgatgcacaacttgaatccctggactcaggagacaggcagatggatctctgtgagtaaaggccacagtgggctacatgagagtgaatcaatctaaaagaaaaacagagctcacacctttaaacccaatactagagagaatataaggagctcagtgcagtctcaggagcggtctgagatttggtgaggagcagtgcagtctggagatgcagtctgaggtttggtggatcaccccttggtctgagcattggtagaggtgagaactcttaggtgccttagaccctttgcttctctgatcttcagcttgaaccccaatgtctgtctctgggtctatattattcatacaacaggagatggctcagctgctaataggaaggtccacaactgaaaagacaaaaatctgcacacagccaatgcaatagctgactctagttctttatatattctagatactaaccctgaatcagaggaatagttggtcttttggaaaatttcaagctgtttattttccaataattactcaaaataggtaaaatgagatctgctctataaaagttttgtaacaaagtaaactagtgactccaacgcttgagctcccacaaagcacctgtggaactaatagagaaaacatgcaaaaataataattttacctgttttcatgtcctgcaaatttccaacttggcttagttgggatccctgcaaaatgctgaaacactcacttcctgaccttttctagtgtttctaaagacagtttctttcaatgggcgctgaataggcaaaatgttacaggaaaggctaaaaaccagatttaaataacagccttttaaaggacattaaaatatgctgcatatggataagaccactgtctgcatttatcattaaagagtaatgaagggggaagaaacaatacattgcatgacttctttacttatgtgattaaaaaaaaaccactttggacctttataatctccccatttctgaactgttgctatatgctgtgataacagggattatcgtatttttgatgttgccttcacaattcagcttgtatttgtgactcctccacttattttcattaccagcacagtgtgcagcatttgctaatcagcagagccctttaaagctgaaatgggaaattagccaacccctttaacacaggccactcagagcaagccgtgattcgagagccatttctgtgtgctgcaggcaaccactgagcccaatgattctgttgataaggattcctaggcctcttccagctaatttctagtggaaattcacaaattccaccttcatctaatgaagttctggcactccacagcattggggatcatggacagtaagcctttaagaagctctagaacctctctgaaagggccctttcttccagcggcatgtatgctcttggtgaccacgctccttggaagaaacaaaattgtcttcaatgagtgagcacacaaacctagagttctcttctatccttaaagccctcaaaatctaaggaagctcggattttgcagtatctatgtaatttgtcatttatatcttgtttatcgatgtacttaagaatattacacgtagtctatggaataagacaaataatggagagatgttttagtccttttggcagggtttgtcataactataaggactcttttttattagaaacaagattgttttacacgtccatcccagttcccttctccctcgcctcctcccctacaaccaccccccaaataaaaccctacctaaaccctatcctttctgctcccactggagggtgagtagagtctgtcgtgtcctttgggatatggcctaggcccagccccatttgtcttggctcagggagtattcctctatgtggaatggggctcccaaagtctacacctatgctgcaaataagtactgaactactacaggaggtcccgtagatttccgaggtttcctcagtgaaaccaatgttcctggggtctggatcagtcccatgctggtttccaatgctccccagtctggggagcaagagctccccagtattcaggtcaactgtttctgtgggtttcaccagcctggtctggacccctttgctcttcactcatccttctctgcaactggattccagttcagttcagtgagtagttgtaggtgtctgcttctacttccaccagctgctggatgagggctatcgggtggcatataagtcagtcatcaatctcattatcggggagggcatttaaggtagcttgtcctctgttgcttagattgttagctggtgtcatctttgtagatctccagacatttccctagtgcctgacttccctgtaaccctaaaatgtctccttctattatggtatctccattcttgttttcttcaattcttcgcctgattcaacctttctgctccctcatgtcctccgcatccctcctcttctccccttctcattctcctagctccctcccccctcttctcgtgctcccaatttgctcaggagatcttgacctttcctcttctccaagggaccatgtatgtttctcttggggtcctccttctttcctagcttctctggcagtgtggattgtaggctagtaatcctttactctgtctaaaatccacatgtttgtcttttgtgattgagttaccttgctcagaatggtttcttctaattccatccattttcctgcaaatttcaaaattccattgtttttttctactgggtagtgctctccattgtgtaaatgtaccacattttctatatccattcttcagttgaggagcatctaggctgcttccagtttctggctattgccaataatgctgctgtgaacatggttgtacagatgtccttgttgtatgaatgtgcttcctttgggtatatggctaagagtggaattgctggatcttgtggtagattgattcccattttcttgaggcgtcgccatactgatttccaaagtggctgtacaagttggcactactaccagcagtggaggactgttcccctttctccacatcctctccagcataaactgtcattggtgtttttgattttagccattctggcaggagtaagatggtatctcagagttgttttgatttgcttttccctgatggctaaggatgttgaacactttcttatgtgtctttcagccattttagattcctctgttgagaacagtctattgagttctgtaccccactttttaattgggttgtttggtgttttggaaactagcttcttgagttctttgtatattttggagatcagccctctgtcagatgtggggttggtgaatatcttttcccagtctgtggggtgccgttttgtcttgctgactgtgtcctttgcctaacagaagcttctcagtttcaggaggtcctatttatcaaatgttgatctctgtgctactggtgtaatgttcaggaggaggtctcctgtaccaattaattcaagggtatttcccagtttgtcttctaatagggttagtgtggctggatttatgttgaggtctttgatccattttgacttaagttttgtgcatggtgataggcttgggtctatctgtagtcttctacatgtctgcatccagttatgccagcaccatttgttgaagacgctctctttattccatcgtataaatttagcttggttgtcaaaaaatgaggtgttcgcaggtgtgtgggttaatatcagggttttcaactcttttctattggtctacatatctatttttgtgccaataccaagctgttttcaggactatagctctgtaatagagcttgaaatcaggaatggcgatactgccagaaggtcctttattgtacagggttgttttgtctatcctaggacttttgtttctccacataaagttgagaagtgttctttcaaggtctgtgaagaattgtgttgggattttgatggggatttcattgaatctctagattacttttggcaagattgccatttttcctatgttgatcatacctatccaagagcatgggggatctttccattttctggtatcttctttaatgtctttctttagagactcaaaattcttatagtacaggtctttcacttttttggttagcgttactccaaagtattttatgctatttgtggcaattgtaaagggtgatgtttctctgatttctttctccaccaatatgtcattggtatatagtagggctacagattttttgagataatcttgtatcatgccactttgctgaaggtgtttatcagctgtaggagttcccaggtagggttttttgggtcacttatgtatactatcataccatttgcaaatagtgaaagtttgacttctttcctttcctttccttccttttttttggttgggagacttctgataactgtttcaatttcattagaggttaaaggtctatttaagtttcttgtctgttcttgatttaattttggaaagtgaaatctgtccagataattgtccatttcctttacattttcgaattttgaagaatataggttttcgattatgacctgatgattctctggatttcctctatgtctgttgttattcctgatttgattaatttgcatgttcactctgctgtttggtaagtttggataaaggtttgtctatcttgttgattttctcgaggaaccaactcttcgttgtattgattctttgcattgttctcctagtttccattttattgatttcagccctcaatttcattatttcctagcatctgttcctctggggtgtattggcttctttgtgttctaaagttttcagttgtgctattaattctctagtgtgattattctcctgtttcttcatgtgggcacttagcgctatgaactttcctcttagcactgctttcagagtgtcccataagtttgggtatgttgtgtctgcattctcattgaattctaggaaatctttcagttcgttttttatttcttcctcgacccaggaattgtgtaattgggtgtttcttaatttccatgagtttgtaggttttctgtaattcatgttgttgaattctaactttaaagcatggtggtctgataagatacagggggttattttaattttttggtacctattgaggtttgctatgttgccaagtatgtggtcagttccatgtggcactgagaagaaggtaaattgttttgtatttgggtggaatgttctataggtatctgttaagcccaatttcgccaaaacttctattagttcctttgttaagtttctgtctggtgttcctgtccagtggtgagagtggggtgataaagtctcctactctaagtgtgtgtggttttatgtgtgatttgaggtttagtaatgtttcttttacagatgtggatgcctttgtattgggggcataattgagacttcatcctgatggatttctcctgtgatgagtaggaagtgacctccttcatctcttttgattgattttagtttaaagtccaatttgttggatattaggattgttacccctgcttgtttcttgggtccatttgattggaaaatctttttccaacctttaattcttagataccatctgtctttgaagttgaagtgtgtttcttgtatgcatcagaaggatggattctgtcttcttatccattctgctaatctgtgtcttttcatagtcgcattaagaccattaatgttgagggatgataatgaccattgattgttcattcttgattgttttggatttggtggtggtggtgaaattatgtgtgggattctatcccttttttccttttggctgttggtaaagtgggtttatctattgcctatatttttctgtttgtagttaacttctttgggttgcagttttccttccagatctttctgtagggttggattagtggatatgtattgttgaaatcttgttttgtcatgtaatatcttattttctccatctatattgattgaaagctttgctgggtatagtagtctgggctggcatccgtggtctcttagtgcaggtagaatatctatccaggaccttctggcttttagagttcccatggaaaagtcaggtgtaattctgataggtttgcctttatatgttacttgacctttttcctttgctgctcctaatattttctctttattctgtatgtttggtgttttgattattatgtggcgaggagaccttttattttggttcagtctatttggtgttctgtaggcttcttgtacttttattggcatgtctttctttaggttggcaaacttttcttctatgattctgttgaatatgttttctgcacctttgagttggatttcttcaccttcttctatacctattattcttaggtgtggtcttttcatggtatcccatatttcctgaatattttgtgttagggatttgttggacttaagattttctttggttgattagtctatttctcttccatctcttgtattctgttggttatgcttgcatctgtagttcctgatcgtttacccagattttctatttccagcattccctcagattgtgctttctttattgtctctatttcagtttttaggtcttgactgtttccttgagagatttgttgatatcttgtattttttggtttgtttttcttccatttctttaagggattttctcatgtcctctttgaggtcctctatcattttcatgaagatgtttttaaggtcattctcttctggttcatctgcattgtgatgttcagttcttgttggtgtatggttcgtagtctccggtggtatcatattgatttttctgttgttgaatgtgcttttaccttgtcctcttctcatcctttcttctggtgtgtatagtaggagtctcttcctctcctggtgagtatgggaccaaggttcccttttggtagatgcaaacagtctgatgtctctcctcttcttgtggatggaggtgggactattactgaggtcttggcagttttctgggtgtgttggctcctgctgccaagttcgggtccagtcagcagacccctggcatcaggtgtcccccaaggactcttttaatacagtgcctaacatacagagggaacatttactgactgaattttgtgtgctttgaatcctatggaatttcacactcacatctttgtattagtaaacatttaacacccagacatctgttctctaataaccctcatgcattctcatatactacctagcacatttccatttagagttctaaagtgtgtggaagacaggagcgacctgaaggctaaacagaagttaactaatcggagtgaggacagggacataaaagatggcatggatggagccattcctatgcaggaagcacacagcttagagttcactttgctctctgaggtaccctgtgaaacatgactgcagatgacatagctaatggttttccagtcatacttgtggtagaggatttatttttgcttaacttgaattatcaaactggcccactcaagtaatatgcttggaacacagacatagtaaatcaatggactcatccattggtcactcaatcaagtatggatttggggagcatgtttcatgttaggcagatacactccttatgacaccaggccatgagtaaagattcctgatagagaagagcaaggacactgacttgatggcttctgatgtggatgactgactacatggtgatggtcgcagtgcaaaactaaataggaagcataggttgattaataagataggcagttgattgataaggtagattttgttatacagcagcacttcttgttatttgagtttcccgctgtggacctagtgagcatcactagtgtacattgggaaaacactgtttttgtgctaaagacatgtctacaagtagagatacagaaatcatcggtgtagagttgatggctaaaaccatggtgatgaaaagatgccctcctcctccaggacaaactatacagagaagattaaatacaggtgtctagaatgtgctttagtgttagggcagtggctcttagtcaaggagactggagtgtatattgccttgagatttacaagtatagacagagtcacactttgaatcacaggtagctcagctcataggaatatgtgtttggaaaatctgtctagttgattggaagccacagttcttaaaccattggcagagtagtgcatgcgcacatgcacatgaaataaccatcaccgacttcctgactctgtgggctcaccctgcctcaatcaactctggcaggcaaaagcctaatctgccaccagtccccagctctcttgagtaaagagcactcacacacacacacacacacgtgtgtgaacaaacacagccttcctctgttatttgttgcctcttgtgctcctgtccatcacaaacattgcattttacttgtgtgcactcccaagttccctgccccctcctaaaaggggaattccatccacgtatgctgtatcttccacccctatatctgtgcttttcagagtggtaattacatggaagtatctcccttactgtcggttgaatgaataagcatttaagcaacagagaaacaagagtggctgcaataagtggattcagctgtttaggagagtagagttacacaggttcttaggatgagcaaggaatcaacctttccagaggagcgtgtgcactggcacagagacagaacagagaggaagacagaacagagcctgggctagaaaggtgggtgggccacagagaacacaggccaatgtagtgcaatgggcaaagtctaagcaagattgaaggtttgaggcttgaatcaataggaaattgagtttcattatttgaagatttgaattaactgtcagtaaaaataaatgggtttgtgagaaacctagaattatgaatgacagtaataagattatagaaaaagaggggaaattaaacagagttgtaaggcggaaagaagcgtaatttgttggtatttggaaaattatattaagtgtattaccattcaatatcccttacaatagatcattttctctgaagacattttcacccactgcttccttagacttttagcgggctgtctagaactgcctagccaagtgacaagtcattagcatgcgtcactgtaactccattgcttttgagactgctttttaccagatctgggccagtgagctaccttagcaggtagatgcttgccaccaagcctcaccacctgagccctgttgcttgggcccacagggagaaaggcaagagcagactctgaagctgtcctctgttgtccacatgtctgtcctccatgccccacacacatacgtgaggtaagttaaagggtgtattgaaaacttaattatttttccagatctgtgtctgtgttaagattatagaaacattggggctgtcccgaatcttcagtaatgtggagcccaagcaattgaccagcacccaccgagaccacacagtacaactaaggatatattttaacttgcaaaggaagaaattttggagtgagtaaatgactaaccaaaatttgactaccagctagtttgtgagttttaagttttcataaccatttatagtttatttgagggctaagtaattttgttaattttgagatagttatttaaagattagtcaatatctagatttttaaatatataatttatacacatatgtacaaataattaagaaacacatacatgtgacgtggatgaatcactggggctcagtgaaagtaggattactttgtggacctgtctgtgccttcaagagagcaaattttacacagacatgaaggaaaactgtattgaaatgacattcaagaagagcagaaaccaaaatatagcagtagctcatagcaccatgtttgaattctcagggacactggggccacattaattctgcacacctctgatgtccatcccatgtgcaaattagcattggaaagaccataatttgtcttcatgaaagctgttttccctgcaaagatgcaaatccttcatgtttccataattaactttgtaaacttcaaacctcacttttttaggttttttttaaatgttaaatcttattggaaaatataaaggagttcactggtaaaagtaaaaaataaaatgaaaatgaaacaagacttttcctaaatttattgtttaagcaaatataagaacacaataatgaaaacaaatttcagcttaggcttagattttaaaacatcttgttttaattaaatgtatagtgtgaaaatattaggaaatagtaatggcttaatcaatatttgctgagcttaaactttactttttcaaattcaaaattttaaaatatttctttcagtgggttattttaatttgctatatatttttatctttcaagttttgcttttttctaaatataacatttatatgaaaaaacacccagttattatttcatgggcaccatgtctttttggattgtaattattaaaaagtgtgagttttctcccagttacttagtaggacagctgttttcctctgaggttttttgtttctccttgactttcccaattaggaaataaatctagctgggaactgagtgtgtgattgaacttttgatggagagacttcatcacaccacagtgcaaccttttaattgcagtttttcacaaggttgaggactgagcactcgtctccggaagtttgctctgattttgagaaaatgcagtcgttttgcttaggttcagctgactgttcacgtacatatgagcagaggaagaaccatatgaggattgtaggatgaaatgaaccattctagtgcctccatcaccttgagcacacacacagcaccatgtcagtttggtgggggctggactctgcacaacagagtgtctacatctgtgtcttatgagtccgtgaaaggtgtgatgtgaagacacaggccagggactcacttgctccaccctcttcagcttcattcctcaagcttgctttctgcagtgaccatggcctttcctggacttctgtgggacagattgctctagttttcttggacatcagcctctaatacctatatcgacattcctttttctcagactttctctgctagttacaagttgcctgacttctaagaccccttgctgtctcgagcttatgttcttgtcttctgtcctctttctcatgaatggttagaacagtttgttcttttagtcttatctggtgagttctgttgaggatttggcagaaccagcagagccagttgccaggttataccaagagcataataccacagtgactgtgccgtgggcgtgtgggtctagtctttgatggcaaaccactaatactaaaggaatcacaaagctcacaataaaataggatgctactggctacagcaaggaacttctcttaatgtctggctcagcatgtttactgatccacgtcctcgtcagcctccacaccaggtgcttcattcacatgagcttacttgttgctcaaagcagccccatgtggaagtcaagactcatggaggccaggtgacctggtgaggaagtgagcagcaagggagaactgaggtgtgactaggggtgggctgactccgaggcagtgcccttcacactggaccagataagcagataagccttcactggggtgtgctatgagatctgaagaaaaatggtttcagtaagaactgcccaacggctgaactgttgtttggcttttttttttttttttgagatttatacaactttaaaagaagacatttttgcttacaatatgaattttgaaaactctggcacttttaaattaattgaatatttaacatcatgatatatttaaaacccatgaaaatcccagtagaatagtttgagtgtctccatcgttagccaggtaggaaaggaagagtcccagaggccagaatcctgacagcggccagggttgaagtggggcgcaagtattccagttccaaacccttgttttctctgaatcagttctctggaagtctaaccatgaatattgcctaactgtcctttcaggtttttgccattttcctcccaccataaaaaagagaagtacatcccaatgatacactcatcaagcaagtacaatggtgactcttacggacacaagcacttccgcagtcaagaccctaaaaagtggatcagcaacaaggtaggttcctgatgcagtagacaccgatgatatgacagcattaggaaacagtaccacttttaaaagactgaagatagacattgatgatagtaaatgcaagcatctcattacagttacgatcttcataatcttaaacctaattgaagctgtttttgtaaagatggtgggtacagctgacctgagtcagtgagagatttgcattaatcctttgcattattggttcttaccatatgttttatgattatatatcctttaatcaataacgtggatcaccggctatgacagatgatcagggttgcggtttgaatgtgaagtccccaagtggaatggaatattgaggatgggggccagatatttctttgtctctcagtctctgtgcatatatacctatatgtgtagaaaaggagagatgtgtgattggcatagacaacatgtactatatacacttgacacatgcatgtgtctatatcgtgcacatttgtaaagtgtacagagcatgtaggcttaaatggcatctgtaaggggtgttgttgttcttgctgccataacaaatcaccctgaaagctcaagtgaaaaaattaataaagttggaagtgtcacactgtcttatttcaaaatatattgcattgcaataataatcaaaacagcatgcatggtacaggcattaaaagacacacactgatggatgggataggagaggaagtacagaaatacgcccacatgtggatgctcaattgatactcaccaatggcagcaaatacaatggcagaggatagggaagagaaaattggattttcttatgcaggaaaatgaaattggatccttactttccaccacattaaaaatcaacttaacacacattcaaggtttaaacataagtcctgaaactactagaggaaactgttgcaataagtctttccactgaagccacctgagccctgccaccacatgggcgctttctgccaggccacccgagttctaccctctgccacgttaaggtcccaagtaacacacagagacttatattaggtacaaatgctgcttggccaatgacgaggatttctcatctgctagctcagtcttaattatcataaatccatatattttataagacttatcgtattgagggtgccttttgctggtgccctctcttgccggcagatcacatggtgactccagagcagagaccaggaggaagagcaagagaaaaaaaggatgacttccttcttgtctttgcttatatatgagtctgcctgttatgtcacttcctgcctggattgaaagacttctttactacatttcccagaatcctcctgactcctagtcccacctatcttgctttcctgttggccaacaggctttatttataaacgaataagataatcagatacacagaaggaccttccccatcaggaaacagaaaaacttctgatattgggctcagcaatgctttttggatatggcctcagatgtataggcagcaaaatgtcagtatgcaaatgaaattgcagcaaactgaaaagctgcacacaaagaagccaccaatcaacagagtgaaaaacatccagtgcgatgaagatgtttagaaccatacattgtaataagggttaaaatatgaaatgtgtaaacagttcctatagcaagaaaacaaacatagggttgtgtttgagtgaaggcaatggcctaaaacgataattttcaaaagaaaacatgcaggtaactagtatggacagatgttcaacatcactaaaattatcactgaaaggcaaattgaaaccacaatatatcttctcatacttgacagagtaaccattaccaaaaaggcaaaaggaaaatgttggccaaattgtgagagaagggaacccatgtgctctttgtgggagtgtaggttaacataaccttgtgctattgtttgacccagcaatcagaattctgagagtaagtcagaagggaatgaaattagtatgtcaaagaaagaagtgaatgccatgttcactgcaacatcattcacaataggacagccaccaagggtgaatgtacaaggaaatgggttatacacatagtgaaatagttttgtgccatataaaaaaatgaaaaaaaaatcctgtaattcatgatgccgatatacctggaagactttatgccagtgacaaaggtcaggtacagaaagatagatactacagtgaaaaggaacacaaccatatacaagatatggttattgatagtatattataaatgataacaatgagaacaagtcacacatgtagctgataaccagattggccttctgagaagctcaatttcagatgcctccgagtcctggcctgaaccccgagagaggaggaacacctcctgtcctctctctttatcccacccctctacgtacctgtgaccacacccaaatgggcatggtcagtggtacaggtatccagagtctctccttacaattccccttttagtctaaagaaaagatgtagtcttgaaacaaaactaaattgtgtcagtatacaaaatgtcttaaacataggtaaaggcatatatacatagaggatgataaggattttttgttttgttttgcttttgtttttgctttttcaagacagggtttctctgtggctttggaggctgtcctggaactagctcttgtaaaccaggctggtctcgaactcacagagatccacctgcctctgtttcctgagtgctgggattaaaggcgtgcaccaccaacgcccagctgatgataaggatttttatgcaccaaacattgtaagtagagagaagacctgacactgtaagacaaattgtcacatacaaattagccaggaaaggaatacaacttgattgtacatgagttacatcatacgagaatctataataatgtaagttgtctatagctaaataatcattaagataaatcacaaaaagatataataatctacctatgtctcatcctagccatctctatcccatctaaactctaaagtcatctgaaagagatgtccaagcctgaacacctccttccaaacccaaccctaaacaatagaaaactaatcctaactaggtgtatattatccttagtgtctatagaggggaaagggagtgtggtattttcagagttacttcctgctgataggggttgacgatagcctcatggggtcccataggaagaaaatgttagagtaaaagtcttgaatgaactagctacaatatttgtactcaatcgggagatgcttgattgaatttcttgatagaagtccttatcttgattgaagtccttgttttgattgaagttctatctgaagctctgtcagagtgtaatcagaacgtgcaccatctcagctaagctgctctggagttgtctagagggatgtagtcccaaactggttttagagtggtgattgacgcatcaagttggatccggtggaatcgatgaggtggggccccattttcttttcggagagttccaagattgctgttaggagattctttgtttgttgtggggaacttaaaatttcaacttttataggtatgcataccaggaaggacaacaatagggaagataatagttatgaaagaatttagactttcagagaaagaaccgagaataaacaaatgacagttccttgattttttctttttgtgtcttacatcaattatcaattggcttcatgatataatacagaaactctgaattttgttttaggaaatcagattcctggtagagaatagaatagtgggtcccaaggactcgaaggtggagcaggactaaagtcctgcgcagagcctctgccctgtgcctctctgctaagggcagcatgggaagctggagcagtcttcctacccttttgataccaggggaaaccactgtgtcctgagtggggaagcagaaggcatgatggtccctgagttgtcttgtggggccattattccgtttccttgaagaggggtggcccagttctctagagtacaggaagcctgtagcttgccccaccccatctgctttcttcaccatttagttcaagctgtcggtgcctttgcccctcaaattccagctctattccagacttctgttgaggggctgattaaattcaagttgagccgtcatccttaatatctctcagtaaaacagagatgttgtctctgctatgctgtaccttcctttaagaagtgcctcgcacacttcatttcatcttaatccgtaacataaacacaggattttcagggagagggagtaattactttgaacataccacaaggtgcctatcttagttcttgttttcattgctgtgaagagacaccatgaccatggcaactcttataaaggaaatgtttaatcggggtggatcgcttacagtttcagaagtttagtccattattggcatggttgggagcatagcagtatgcatgcagacatggtgctgaaggatagctgagaatccttcatcctgcaggcaacaggaagtctactgacagtaagaagtctactggcagtcacactgagggaagctagagcaaaagagacctcaaaacccacccctacagtgacacacctcctccaagaaggtcacacctcctaatagtgccactccctttaggagctattttctttcaaaccaccagagtgcctttatgtctaacattttgatttactattgttactgatgtgggtgtatgtgagagcatgcatgcatgacacatgtgtggatgtctgaagatggctttcaggggtccgttctctctttctaccctgagttccaggcatggaagtcagtcctaggcttgctgagccatctcacctgtccaggaggcatcttttaaattatacctaagtcattctgtttaaagaccatcttcaacactagtaattcccagtataaggttagacagtaagctcagttggtttaccctaggaactgattggcagactgaggtggggttagcatgtcattctagaaaataccacaaccaacctattcttgacatcttccaccaatatgcaactctcactgtttaatttcatattttagatgttgataaatgtgatatgtatttcattttctatcaacgtaagttttcatgttggtgccttttcaccatttgattgaatttagctacaggtttcaagtaacttgctaactagctgggttaaagaacaacagttgcagtaagtcaaatatgtgttcacatcaacttaatatacttacttcttactacttttgttttgtctttactccaaagagctttatacaaaaaaatcataagttcaatgaattgagggcaaatgatactatttttccaaaaaatggaggcagtaatgaaagatataatttcctttttaataatgaatatatatatatatatatatatattatatatatataatttcttttttacatgtgcttttagcaagatggcatatgtgtagtcaattttagtgtgtggacacgtgtgggtgtgcaaagctgacattaggtatctttcttccttcctttgctgtccactttgttaactgaacctgagtctctcactgaacctggagcatgcttgttcctgtcagactagctagccagccattcccaaagaatctgtctgcctgggactacaggtagtgccatgcctaccagacttttaacttgggttctggggattcaaacttctgtcctcatacttacttggcaagtgctttatccactgagctatctcctcgccctatgctgtattgcttaaaaagagaaaataatgaaataatttatatatcatgcaaattaccaatatttcttcaatctacttgtgaactgcaccaaattaagctacccagtttatactcagtgtttcaagtaatcagactttgaaaatgaggtaaatactttagtattataattctctacagtgctgagctcagaatggatgtgaactaaagaactcccagtccgttggtgtttgtggcaactgttcaggtatgtctaggagtctggcaatcaacagttccacacactcgaaatgtgctttgcttgtcgacatatccatgttcacatttactcaagcccaagtggccatctctgtccttacctgaattggaatggtcttctgtgtggcccttagtcctgtttctcgtggttttcagaccagggagagagatgctgaggatggtttgtgttgctagctcctttctccatccgcctggttacaagtgaatgatgacagcagaacgcccagctcttcatctgcacatgcacttgggccccacacatgactgtacatgatgcaaagcatagaaatagccagcactccaaagaattaatttagggaactaagcatattgcacagaacataaagctgaccttccctgtgcatgctttgggagtggggtgggatggggaacacatcacggatttaatgtgccacatcgcctgctgcagaaagctgggtgggactgcaccagagattgaatctgctgtcaccagcatcctgatgataatgaacactcagcctaacgaccgtggtgatgatgatcataattgatgtgcaagtgttgtgtgtgggtcgtcacagttgagctgtgcagcgccgcatgcaccttggctggggcagttgtgcttgcaggcgctgattggggtaaaataggcctctctactcaaacaggccagcttcgtagaattagaggatctttctctgcttgcccatcagtgattagcacttgctgaacaacagcccttcacagtgtttgtttggtgcagtttcgtttcattaggaaatgtaaacaataaaataattaggtgtaattgaagggaagtattttgctcatgagctggccttaaataatcaaatatatacagttcctctctctcttcctccctccctccttccctccatctctatctcccctaccccttgtcctctcaataagctcagaggttggcccccgtgaccacccttgtttagtcttgccaagcttgagtacgtttcaggacaagtgcaaagagataaaaatttgtgttataattccagacagttctgtatatatttgtttcattgtggagcaacacgggcaaatggttcatcttctaaagataacattcaacccacaatgcagtgtatgtgtataagacagacatatttatgtttgtgtttgctctactttttaaccattgttttctttggatccgtttgtggcatgctttgttaattttcaattgattatttaaatgacctcaaagagtttctgatttgacctttaaggtataaataaaaacagcattgcagtgatgtatccaggattttggaaaccttagttcccaatgcattatcctgtgatcactaagccagaggttcagtttgcatctagcacacttggcttgagcattgaacaaacaacacagggcagttttgcaaaaaacatgtcatccatttgaaaagactctttatacacctaacccactgtcccaaattgagcaatgtctgcatccaattattaatgaccacaaagatctggagagatgatgctaaacaattgcccctgagacctgtagaatttatatcaccccaggtgaaacatgtaccccagctgttcatgtacagtggtagagggcaaaatctttgcttgacacttctaagttttatagcttttacccataaaatttcccacctaaggttttagtctgttgtagtcagtgatctctgaaaagttccctttgatgttttaaagtcttcagactatcaatgtgtcctgtcttctgtgcatttttgctaagccagaataacaagagttaaaatcaaatgataatggtcatggaatatcgacctctgcactgctgtgtaactaaactcctaacattacgttttccacattttgaaggtttctctctctctctctctctctctctctctctctctctctctctctctctctctctctctctctctctctctgtgtgtgtgtgtgtgtgtgtgtgtgttttcacagtgtgtacaaccagagagggaagtagcctaggaaggtcagaattatagatgtttgtgaactgccaggcatgaaacagagttccagtcctctgcaaaagcaccaaatgctcttagtagctgagccatcactccagctcctatcttccattttaacttctttctctaattctttctactcatttctttatcatgtttcccattttagttgttttctactctcttttaatgggatttattgaattgtcactgaaataaatttccctttggccatgtgtattgtaccttcatatgtgatgtggtgctgtctttgtcctcgatttcttctctgggtagaataacaacagagcttcctgtgttgttttggttttagttcatttctagactttatctctaagcatgtgattaaggtatgatgtgtagaaagagattctaattgttatttgaggaaatttaattctttttgaaatgctggtttctctctcttttgatttttttcaagacagggtttctctgtagctttggaggctgtcctggaactcgctctgtagaccaggctggcctcgaactcaaagagattcacctgtctgcctccggagtgttgggattaaaagtgtgcaccaccaatgcccatcgaaatactggtttctcatgttttcaatctatcatgagttttaataagcttgctatttttcctgttcttatacattttatggacggggtcctaggtcatgtctgtatttttttttttgtcgccatagtgggttgtttgttagtgaagtgatgctgcagagaaggaacagagtgtatctatggccttatttctacagaagtcctgtttcccaccttacctccttctttccccatatttgatgacctaaagggcgatctattgtgatgtcttcatgtttgtgtctccctttagcttctgccatggacagccacatcactgggtgctgtttagtgtcctgacacttagtttgtactgagtgattttgtctatatcctctatggcactcccctcttgtgtagcatttgtaagcattcacatacctaggattatgtccttcaatggggcactttattgtctctgttagaactgaacgtttatttctttagttataggtcacatgaatgtgttttccagtcctcctagtgtggggaggaatgtgttgtgtctactttcctttctgctccttgtgactattatctgaatggagggggttgatacgcgagacatttggatttagctttagagtaggattgggatttctttttccttagggtcagctaaaaatccttgaaaatcatgctaatggcaaatttccttgatgactcaacaaatctttattaaacaccttgtatggctcagaatcgggctaggcatcaaggatataaccttgagcaaaaacaaacaaggcctctgctcccaccaagcatatagtttataaggaataatggacattaatcattgctcaaaatactgtaatgaaaaagccatagatctgcaggattatatagcaaggaagcatggttcacagggggaatgaagacatgtagaggaaacagtgcttctgctaaaatatgaagaaatgttaacaaacaagatctctctctctctctctctctctctctctctctctctctctctctgtgtgtgtgtgtgtgtgtgtgtgtgtgtgtgtgtctgtgtctgtgtgtacttagcaagtgatgatataatagagaggagaacctctaaggatctctggggctgcagggaacatgaacttaaacatctcagggagcatgagcctttatgtttcaaggaactgaaaggaggcccttgggagatgagagtgtaaatgtgtatgtattataggactcattgataaagtgcttgccatgcaaacacaaggacctgattcctgaaacacccacacagaaataaggtgcaatgttatatacccataatcaggtcagagaggcagacactgttgtggcttgctggatagccagtctagcccagttggcaagctctgggtccagcaggagaccacagagagaaaactattgaagaaattacccaatgtttataagcacacacatataccccgtaggctcaagtataccaacacacagagagagggagagaaagagagagagagagagagagagagagagagagagagagagagagagagagagagagagggggagagagagagggagagagagagggagagaggagaaagagagaagattctggattcaggaaccttgttgctaaatctacagatgaactctataataaattaaagactttggtttttatactgtgaaatttgaaaggtttcaagcagcattgaaaagatgagatttgtattttcaaaagaaatcatttgatttcaaggtggataattacttttagagatatcaaaataaaaagggaagaaatcagttgggaatagtagtccaggtaggatttaatgatggagtggaaagcagacttggagagaagggaattagttcaaaaaatgctaaatatagaaacaattgttaaaactaaaattggaaatgaattgaatgtgatcgagttcaagaaaagaaagtttgctaattccccatcattttccatgataggaaactgggttaacagcaatagttctcagtgggagaaaaggaggaccacagtttggggacaaccagaggggagatcatcagtctagtctcagacacgtttgagtttgaaatggctttgaccccctctattggaggtgtcagaaagatggctgaccattgaggtccatttcttgcaagaacagtcttaactagggtttcaaagttgagtaaattgcttcataaaaataagataaaaggaaaggaggaggagagagggaagacagacattctaaggaatgccagtatctgtggccactaagaataggaagcccttaaagcagacagttaacattggagaaaaatcaagagaacagcattaccaaggaggtcaaggagaaatggcgcagtaagagttaggagtgatgagccatgtcaaatgatgccatggagtcagatcagatgcgtgccgggaagcccacggacttggcggaccacaggtcactagtctcttactgggagcttatttaatgccagtgtggagactaaggcagcagcagtcactgtgagtgaggataagaggagcagctacagtgtctagaaaataatcttaataggcatgaaaaagagagtcatagctgtgaggaagtatggagcaaaatgatacctttattttgtttaaaaaatgtttggcatgaataaattatactacatacatattttaaccaattttctagttttattttattattagttttattattatatgttttattatcttatcttattatttaaatttatctaaaaggcaaaaatttgtttaccttttaattttgtgttttcaaatttttataatgttggagatgatgacatcactttcttattaaatccactcttggagctgtttgcaaagggttacctcacaacaattgagatatttaataaaactaatcttcctcttctgtaatttctcagttggaaaatgtggtcccttgatgatggtccctggctttgaagaataaatggattctgaagagaaaattagatggtatttattacgcagctaccatcagagcaccgccactctccacggtgcctggtctcgcttcccctgtcttctgcagaatggcttgcctaggctgcatcagagggggtgctgtgtcactcctcttgttttcttagacatatcaatgaggaacctcctccatgatgctcttctaaagccctccagcccacacaatcatcttaacaccacacactatgagtttccctccactccttccttcagaaggcctctcctagccatgtgccgtgtgccctcctgtaaccccagcactgtggagtagagacaagaggatctttctaagtttgaggtctgtctcactcatatagtgagttccaggacagccagggctgcataacaagactgtctcaaaagcaacgagaagagaagccccctcagtcttcctcaatgtgttcctttttttttacatttttttatttatttaaaagtttttttttcagtttactaccaattaaaattccccttccctcccctcctcccaatccccccatcttccacccaaatcccacccactccttagtaagggtaaggcctcccatgagaagtcaacagtctgacatatcaagttgaggcaggatcaagcccctgccccctgcatcaaggctgagcaaggtatcccaccatagggaatgggctccaaaaagtcaattcatgtacttagtgataaatcctggtcccactgccaatggctccacagactgcccaagccacattcactacattcaccacattcacctacattcagaaggcctagttgagtcctatgaggttcctcagttgtcagtccatagtcaatgagctcccactagctctggtgagccgtctctgtgggttttcccattgtggtcttgactgctttgctcatatgatccctcctcctcctcttcgactgcactcctggagcttggtccagtgcttagctgtggatccctgcatctgcctccatcagttactggatgaaggttctatgatgacgacattcagggtagtcactaatctgattacagggaaggcccattcgggcaccctctccactgttgctgagagtcgtagctggggtcatcctggtagattcctgggagtttccctagcaccagctttctccctaaccccataatggctccctctatcaagagttctcttccccccctctccctctccctcccccaactcaaccatccctttctcttaagtccttttcccctctccccatcacccctccatcccctacccccaccctgcaggctttctcttgctctcacttgcaagtctttcactggcattagagcccacttctttggaatcctagcatatactgaagaacatctgaggtatcaagccttgtagactgagcaattactggattcctgaaacttctgttggtagaaagtcatgtctattggactagctggaccacagcatgtaatccattttaataaactctctctctctctctctctctctctctctctctctctctgtgtgtgtgtgtgtgtgtgtctgtgtgtgtgtgtgtgtgtctgtgtgtgtgtgtgtgtgtgtgtctgtgtgtgtgtgtgtgtgtgtctgtgtgtgtgtgtgtgtgtctgtgtgtgtgtgtgtgtgtgtgtgtgtgtgtgcgcgcacacacacacacgcatgctgcttcaaatgttgagagctttgggctttaaatttagctatgtacttgtcctcacatgactttgatttctgttttctcttttttcaaagtggaaaaaggtatcccctaggtatggagtatctgtcgaatcagagctccagtaagatgctttgtgagggacaaatgctgacttttccaaagaagccctatttggagatcatgtccttttcctttattgtgtagttgctacagccatgcatgttggtgttttgctgtcagtgtggtctgtgacagctaaaagctaggaacctgggcactattttaaggacatggaagttgattcaatagaattgactttaaaagcatgctcggaaatttttttaccttaacaaaaatccacacattgactctgtttaatgtgagcttactagctcacctctactgggattgaattggatactgttctcttctgatcttattctccaggtaaatgggtttattttaatgaaatcaagtttgcagcaccacccgtaatgtactgtagcgaggctcataatcagaataaagcatgcaagtaattcagcccatgagtgaactctgttttgtaataaatctctctcttgcacataagctcttcctgcctcagccccaggaaccctggctttacaggcaggtgttgacaacatgctgacttgaactccttgcattgttctaaccatagttcctgtctctcttgtgttatttggaccttacagctgatccttagctaagggcacagagtttgcgtcagcagttatttccggcacataatgaaaacataatgaaagcatcgccttttgttaacagctggcacaactatactggtgcacgctgcctgaatctcactaagggaatggtcctgtgttaacccactttcaatgctgcctgaatctcactaagggaatggtcctgtgttaacccactttcaatgctgcctgaatctcactaagggaatggtcctgttttaacccactctcaatgctgcctgaatctcactaagggaatggtcttgttttaaccccctctcattcgtgctgtaggatttagggctgtcctcctgaccctccattttgttggtgtgtaggtccacagaactatggaagggttctcagcaagtagcaaacaactgctccctgaggtcaggaaaattccacattcttaaaaatctgtgatatttgattttagtgagcacttatatgtggtgtctctgatttgaggcatcacgtaagttctaaaatgtacaggagatcatgaagacatggttaaaaacctgtagctgtcattaaaatgtctactccaagacacaggacaatactttggatgtcttgagttaatatactttcttaacacagagttaaagtcatctgttttctgtcacatttttaatgtgaccattagaaaattaagctgacctttgtggcagacaaatgttccgtgttcctggacagttctacaaaaggatgtgtttacccaattgctcacagtagaaagtttagcagcatgtggagaaatttcctctggtatctcaggcaaacatgtcctgtagtgtcactgtaggcatggttctattcacagtagaagagcccagcagatgtccagagtgtgtgctgtttgtgcatctcatcgaaccactcattatgggccaactgaaagggaactttgaaacagagagtagaaattttctcttggaaacaactgttaattttagaaccctcatgtgaatcaggagtattgacaatgaaagctttggtattattttcacgatgttgtctattgtgtgctatgcatcttagactggctttcactgtggcccaaggactaaagcaaacacctctgttatatgcaagctaagggattcacttcccaccatcccttttcattagatttttatgaatttacattatgaaaagtcagagtgaccatccataattcaaaggaaaggttatagttcagtagttgaaagaaaaatttaaagcaacattttcatcaatttctcggttgtagcaccggggtcttaagtctaagcatacatgaaggaggtctgcatttattcacagaaatgtttgaagtctctgcacccttactacagcattaaccaaatctcccaacatttgaacaactgtttagaaattctgatacaaataaataggtgtgacttatggacccgggaaacaagaagaaaaatcaatcaaaagtactctggatattaaaaccgactttgtgctctgatgtgaggctgcttgattgagtggtgtggagacaaccacgtccatctaatgctaagagtaatgcacacagacagagcgacagtcacagcacagcctcccatcagcaataattaatctcttagttaagagagagactcagaaagccactcggcagcctcttctcaagtcggagggaccctggtttttgatgtttgcattctgagggaaattgtccccaccagttctaacaaattgaaacaccaggctaattatggcagctaatgaagtgtgtggaatggtcacagcttgtcgtgaaactgttccttcagcttggattagagtttcatcaatcactgttttaaactgatccagaatcgcttctgcccgctgcttggcattttaatgctgtctctataattggttttttccctaagcttaggctattttttgaaatattacattctcaaggcaggacttgcaaactccagtttataaaaagttactattagagctatccagtgatcaagtggtaaagggctaataaaaggcccatggaaataaaactcaccgcagcctttcagtcctcccaggaacaataaagcctggacacagagaataccgttgtcagacatgcatgtgacatagtttgggagaaccatggttgttgattggctgattaaattccacaagggtttctgcaaaattagtatgtagatactggcttatttttaggagagggcaggccactacatataagagctataagatttacacagttggcatcaagacaaacattttgaagcatggagaccaaagggatacttgtattgacctatatgtattgacatatatgttcatatactaatattttgattgatttttcttttctgaatccagtttagtagctgcctaattctgaaagtcaactcacaaacccttgtttcaaagtctttgtctagtctttaaaagggcaccagacatcttctaggtatgactacagcttccatataatgaactctcatttttaatgttagtacaaggtagccgtgaggtagcagcagtgaggctcaacccgctgtcctcacagtatgctctgtatttgcaagagaactcgggaaaatgggcactggtttctgtttgtgtggacaggtcccataaaagggtaagattaggcaggtgtgctggccatttgtcccctgttacacagcatgagtgacatagtctgtgtattccaaccctttttattcacccatcacattagataacaatgtgcttatcaaacttatatgaatttaggaagatctgtagccgtatagtattatttgaagccataaaactagcatttcctcttctccatggcttagaaaccaagataacatacagttaatcactgtgagagcccagcttatcagcctctggtccagggcacctccacagttcattttaaatactgcctccaactggaggctggcttctgagactttgtagatctttgtagatgtttgagtgttttacaattgtactgttatatcatgaagaatttgttgcataatgtacagaaatagaaatggaatactgggtaacaagatgtcttttaaattattttgttagtttcatttactctttagtcaaatgataaattaattttaagaatattaaggaaaattttagacaaaagagtgataaaaatcatttataattccagatatgtctcttaatgtttgataaatttggattttttatttatccactaagaattatatataatattttaactatgatatattctccatatgcagaaaatacagcaaattatattgactaaaatgctaaggagagactatgttatatactaaatagtttgaaaatgacagactttatgctttctattgtaagactgtttttcccttttaattttatattcaatgattttacaaaaatcactaattgtagtttaactgttgataatttctatataccaaaccttgttttatatatgtaataatattttatttcttcctggtcatttcctcacagcaaatatttttagtttagtttttcattaattgtcatgttctatcatatgttattatgttgcaatagttcttttgtttctattttactgagaatcctttttatattataagtaggtcctcaactttgtcaaatgtttctatatcctgtgctgttttttgattgaattacaccatttgatgtcttaaagtgatgtgttcacagagtaaacttccttgatcatgacatactttgccatacaccacagtctgctatacttcttttggtattgtttacacttgcatttaccagtcggattagtgtttgaattttgttttcttgtaattgctagcaacatttttctgactttacagagtaatttgggtcatattccttttattttatttttgaaaatattttatagaaattactatttgttccataaatatttggaagaacccactaatcaatctatcaagtttgtgtggtaggtagtctttggggtggagcttacctttattgatttagttattttaatacacagaagacaatcctgatgatgtcttcatcatgtctgtcattttagattatgtttgttttcagaatttgactcactcatctgaatttttctgaatttctaaatttccacatttgtagacaaaatacacagccctggtttcctcttacactgctcagggtgtctgcactaatgcttgagtgctgccttctccttcgtggagactgataacaaattttcttactgatcttactggggacttttcagttttatcaatctttataaagctgacttttgtctttgttgatttttgtcttaagttaatgactatttttatctttctttaatatttgctcttatgtttattttttgaactctggagtttaatttgctgctattgttcttgataataatcctcagataattcacttctaatctttatgacatgcatataaatttatgagcttctttcaaggtatgaatttagtagcctatcgcagattttcatcttagtttaaaatttttctatttattcctatattgactaatagaatttcaagatgtcctacttacatttattaatttacttgctgaagtcccccatacccaaagaaccaatctgtgattttaatcctctcaaactttttgtacacattctgttctgtctatgtaaatgtttcaagtacaaaaaaaaatagtatatattctgacctgctacatacaagctgcccgttacaggacatataacatgtcctgggggaggtgttacttggcttcaggatgtcctgttgcatagggattctaagaagtagccctgggtttagaataaataaataaataaataaataaataaataaataaataaatgcccagacattattgctttgggtacattcaacaacacgcctgggagcttagaaccatgtgatgaatctgatgctatgccccaaatattgttcctctcattgtctttttggtgatgtctgcaatgagactgagtagctacgggccttggtggccatcctcagtaagaacgcagaccctcagcaaatgcagtgacaaaagtcagagcaatgacaggagaatgtgagcctctcaccttggggagcccacacagccctccctgcacctctgcgtaaaggagaaatggactttcctcttgtccgtttcgctcctctcttggatgttctgtcaacagcagcagaatctaatgcccattcacatgccggggaagaatgctggcaccgcagtgtgtatatcaggcccaggtccatttgcaacagacctcagatacaagattcttgcccttctatcaatcagtaatagaaaagaaatctctgaggtaagacttctgctttcattgtacactgggatggggcgcacattttaattacttcctttaaagtgtgaccttcccttcatcactaattcaattttgagcagccaattgttacctccaaagtgaatttttaacatcttttttattattggtgtgtattaattgtgcagaaattgagtttcattatgacattttcatacacgtatatagagtacttccaaggtgaattttaattctactattagagtcttagttttcttcctcttcttttttttttttttttcaaatcatctctgcccttacttttatgagtatctggtccttcttttcagcctactttatccatttagcctatctttttttagtataaaagagaattgaagctagcaaattagccccatcgtctatgtgttttcagcttgcaatgcagggtgactctgagctacctgttccttgtccaggccctcagcatactgttttcttctcccatgggcttacatgactgttttctcctggcccatctcattttgaagaacactagatacctatatggaatgccaatgtatttggccctttagacttgattgatcaagatctctttccaggcttaagttggagaacagccccatcccctagctccccattgttgataactgatgactgtgagaaccacttctcagaacgccgtgccatcatagatgccctgcatgaggcggtgtgtgcccaactcaggctacagcgtgggttccgcagctcagtgatgctgttctctactccctcctctaaacatacctacagggagaggtgtctgctataaagaaatagccctttagtcctggtgctgggtcaaaagtaaggggaactctgcagagcagaggacttccgctgtgcattctctgtcctttgcaagcttcagtgagtttctggccaccctgcctgagtgccaaatcctcttcgcagatagttctttggttacatttttacctatgcactcatgagtacctaggtaattagggccctggcccagcatcctcacacagttctcctgtgtgcttaccaggggtgaatgagggtttgtagggctccaaacagaagattgcctcaagcgggccattctgcctactctcagctaattaccatgatgcccaagcaatcatggaacacaatcgcattagcagttttgataatttgtatagaatgcagttagatagttaataaacagacaaaatagttaaacactttgccttttagtgttttagtcacttccttggaaactaagaggctcatgtaaatatcactcgagatcactgacacctgtatcacactctatattagctaaaaatatgtcagtaagagatgtatcaggaattactcattagcatgctagattgcattgctaagaatgtttctataaaagaaatcaaaactcaaatttgtctaacattttaatatgatgtttataatagtcttaagtatttctgaaattattgtgtatggggcatgattgtgtgtcatggcacacatgtggaggtcagaggacaactgtggaattggttgtctccttccccctttccgtgagttctaggatcaaaccacatcattaggctttcacagtaagaacctttgccagctaagccatcccactatctccttaatagagtcttcatttaacctgtcaatgtggaataactcctataccttttctttcttaaataataggaaaagcttctggaagacactgacttgcttgtagcactctgagcctatgagagactcccattagccttcactttcctactgagtataaccctgctagaaccatggcttgttcccatccagacacagcacgacgatagcttttgtacttggtgtcctacttgttttctggttttgttttttttgttctgttttggttgttgttgttgttgttgttttcaagacagggtttctctgtggctttggaggctgtccttaactagctcttgtagaacaggctggtctcgaactcacagagatccacctgcctcccgagtgctgggattaaaggcatgcaccaccactacccagaagatgtcttactcttatagtgcatcatttttgtgtctttataagaatagctttactaaataaaatagtccgcccaatgatctaagagtggttagcctctgtaacaagccatcatttcccaagtgcttgcacaaagcaattcacaattcgttttactgagaaaataccatattaatgagttagctttaaaattacagtttaaggagagaaattagcaagggcactggccagtaatccctgtgctcaggaggccaagcaagaaggtcagagtaaggttatacacaaatcccaggtggggcagggctacacagtgaggctgctactgaaagcaggcaccaggtcagccatgggaagacaggctttaaatctgtctccagtaaattcttctgcctttattctctttatatggagagtcttcagacagtctctctgtagcccaggctgaccttaagttcacgatccttctgatcccacctctaaagtgctgtgtttagcagggtgtgccaccacacccagaatttctgataaattcctatttgaaaaacgaaagcataaggggtgtgtttatttgtctgagtcaagacaatgcatgcacggttgaactcaattgtatctctatgttgtgtgactacaacagaatggaattttaaagggcaacaatcatctaaattgtttcatttatatacactctcaatatttaaatgctatattgttaaaaaattataatgtacttttatactaaatatttatattacattttcatgtacctcagatgtcaatgtcttttatgtttgacagtctttcatttatgacatctaaatagatgaggagttgtatttatttgttgttcaatagattgtactttaacaggtaataaataacaggtaaatatccttcctgtttaataccaaggtgttttacctatatgtgtttttagttcaaactcagaaaagttcaagggcgtccaagtatgaaatagcatctgagaagattcccattgctctcttaatttgatttagtcagagaaaaggacactagtccaaaaaatagatatttaataattttggtccaaaaatagacactaaatattgtatataaaccagtaaatgtgcacataatttcctcaaagcatgaagaaggagttggcattataaaataatgtattcatttatgttgagtgtcttacctgcattctaatgttttaatatctttatctacttgtagaaaacataattaccatatgattttagattaaaataatacaatatataaggccatatgtttaagcttttagaataaaagtagttatttttcataaatgatttttaaggcacatcagtttttagaaacattgtggtttgatgagcagtgatcaaatggaaatgaaacttgactctaaggacaagacacgcaggcatgacgcaggcatgactcctcctagacaccagcatgctgaatagttttgtcttctacctaagttccacgtgggaaataagagaacatatctcctaaaccatggcctttagatttcttagagtatagtcacactatcgtcctgactaaacaagtatgattctttacggagtttccctatgtagacacagttgcctgttacatggagaactgcacactttgtttccctgtcttcttctctggagttaggattcgccttctctccattctctccatttctccatgtctctcgtccttttcccttggccctttatggcctggcaatatagttttgtcttctcagacccgtttttcctagagctactgtagtcactgatggagctctttaagtgacccttggacgtgcatgtgccttgtgtgtcctttccccttttcagtgtcctttactttttcagaggctccctggagtacaatttgagttttttcataaagttgtattttttgattgcatggcatcacttcactaagactccttttctttcttattaaatagcagcctacacttaccaaataatgccactttccctttagtgtctcttagggtactaacttttcactgatacttccttacatttctctcagcgtcatctaaatgttttaatactgttattttttctgatctatatttttaattggagatttttgtagtcacctgcttgtttttcctttattcatccactcggtagcaaggcacaaaccatagctgtgatctctgtctctgtgggagggatttggggcggtgttactgtgggttcctgtcagtgaaggccactgcctggggctactcactttatccaacacagtcttgtctagtcgcctgccaggcactggcactggggtgggaggtgaaagcaggaagtaggatgtggctgtcaacgttcaacctaagaactcacttaatctttagtacattagcgcatcgtgtcattgggtaatggcctcaggtggtaagagctgaagctgtactgtactcgacagtaacccctagccctaaagaattgtttggccccagcctgagattccatctgcagaatttaggtgtgtcaatggcagcaatcaaatggcaaaaggccatttgtgtgtgtgtgtgtgtgtgtgtgtgtgtgtgtctgtctgtctgtctgtctgtctgtcgctctctctctctctctgtgtgtgtgtgtgtgtgtctgtctctgtctctctctctctctctgtgtgtgtgtgtgtatctctctctctctctctctctctctctctctctctgtgtgtgtgtgtgtgtgtgtgtgtgtgtgtgtgtgtgtgtgtagtttaactgggagcaaggtggattgtttttcatacctaaacatagcatttcatgtggctccagtatatgcttaaaactttggatagtactgaaccttatatttcgtatggtagtctccacatcgatgaagatgagttcaaatgatccctcttaaagtctggtaacaacatctactgagaaactgacaaggtggggtacacagatgtattgacatttgtgcattgcaagagccacacagaatgtgaaacccaaaggagggccagatgcttgagggttccgtcttcttttcacagggtaaaagaagtttggtatgtagacaacttcagtgccatagtgagtgactctttgggaagtgtgaatgggacaaagcctggtgtgatgtttgatttttactctctccctctgtggtatgagtattttctgttagctttgtagaaaaccaggagaaactgttctcttctttagcagtctatctttaggtatgagatcaggaaacctgagagaaatctctcctagccaagcccagaacgggctgtaccctaagtactctggttgaatccaaagtaacatatttagggaattatttttgtaaagcttgatttaaaaaatcaggggcaacagctgtctcgcagagaacccaggtccagttctcggcactgaaatggaagctcatagctgcctgtaactccaggtctgtgggatcaaacccctcttctggtctctgcaggcacctgcacaaatgtgatgaccatgaatacgtgctgacacatatatgcacattaaaaaagtagacacagttaagagattaacaactagcaataaaaacataaaaccattatagcaatatataaaaatatggttcagactttaaaggctaggctcacaaccaaaattaaaacatagtaggtcagtgattctcaacctggggtagaaggacctttcatgggagtagcatatccgatacgctgaatatcaggcattcacattacaattcataaaagtagcaaaattatagttatggagtagtgatgaaataatgttatggttggggggttaccacaacatgagcagctgttattaaagggtcacagctttaggaaggttgagaagcctggcattaggtgcttctggaatttttcatttgttttcagactatgggtaactacctgtagataacaaactactcaacagcctaaaataaggggtactattttgtgtgccttgcccttgcccgctggtggctgtgagctccaagccctccctgcctctgtcctctagagaaaggccacttgttgacactggggcagaggaaggggcactgtttctgtggagagcacagagatggagctacgggacttgcactgcacatcctcacatccagtttccgggaaaccctgctcctcacttctgcttccaagctgtgtggcggtcttggcggctgaggtttctgagcttgaagaggaagagcaggatggaatgccagctgtaccctccatgtgtgtctctctcgtttttactttcgggtttggtgccacactgtagctttgctgagcatcagtcatcgcggggttaccactgccttctactctccagcagatgtaatttgccggatgttggttaattctctgttatttgggaggaggcatttctgagaggactgaacaggacaaaaattcactactctgccatgttaaaattaagtcttccaacaaataattttaatacacagtttacacatttttacagaaaggcttttgaaatgataacatatagcattataacagaaaatgatagtatataaatgagaaagtctagtgctttgcaggcttttatcaccacaggccttcctgtacacttggatccagccaatgaaggttatggatagagggcctggcttttccccaggcaactttccacctgataggttgtatgagacttcaaggggggatgctgtgaggtaaaacaagaagcagagaaggatatggggatggctaaagattcacaagaggccttcagcacagggaaattcaattcgtatctgaagagaggctctcttagaggaagtggtatttctgtgtaagacttgatgtctgggtggatctccatctactgaggacataataataaacatttgttacgtataattaacaccattcagcttcggtcatttgatgtgttgcttcccatttgtgctgatggtgaaggctctttcctcagggccttgtctcagtagcaatcagttcacttatttccatcttagtcttcctgagagaaattatcaaaatcatatctatagagaacattcaccattaatgacggttattgatatcctataattataagaaaatttgcagtgggaattccattatcttaatgatgcatgtatattattaagaattataaatattgaggaataaaacttcaagttcacatgctcccagatgttattttgggattactagactggcaagttttcaaaaacacaagcagtaattagaaatctttcaccattgctctcagaaacagtgcttaattttcagttctttcatttgacaaaacttgtaagaaaacactgtcagaactattgacattttgatagcctgacaaaaattaagcataattacaatgaaatatttgttgcataaattaaaccacaattaatatgttttctgccagtgcttgaaggataagattaaaacagcgtcgttagcgggctccccactgagagactaatttcctggttttcatacctcacatcatcatatgcattctcacagcagagctttaaatcaacaagtggaaaacactgctgaaggctgcgtgcacaccagatgaaccgcttttatgacgcgagtgagcaaggcaggattgctttcacagtgtctgatgaatctgcgtgcacaccagatgaacctcttctggagggagtgaagcaggattgctttgtctcttcggagctgatgactagttgactccaaggggaatatttgcacttttaaaaccattaaaatacatagaaatttccccttccttttagttagttttgccttttaaattagccagcttattgttttaagggtgcttacctttttagaaggtaattagaaactgcacatgatatgtgctatgcacaggcctgccctctggctagccaggaactaataataaatcccagctaataataaattccagaaaagtggaagaaaaatgtgtcctcttagtgaagggctacttctcccatcagtgttcacagccacagagggtggtctgtgagtaagaacacttgctgtgcaagcatgggatccaagggaagagttccagaacttgtttctgtttgttttgtcctgtttaaagccaagcatggctgtgactgcttataatccctgcgatgggaaaggcaggccgagaccagagggtcactgtggcttgctggttgccagagtagctgaaaacagggagctccagattcagggacattttgtctcaaggagataacgtaggcagagagcaacagaaggacagttcccattgacatccttccacccatgccgccctccagcctctgtgtgtgtccacaggcaaatttacctgcatgcacatatattacacacacacacacacacacacacacacacacacacacacacacacacacacaaacacacacaccaaattcccaactgcccagacaacatgtcaagattctaattttctttttggtgttaggcactgtttggaggctcaatgaaggaaagagataaccattgcccacagtcctctctacctcccggtgtctttctcaggcagcactgcttgggagcataaaaacactgtgaggatttgcaatgagcgggtggcactcattcactcctgagctgttgcccccctcttcctgtgggtatgctagatgctggcagcatacggtttggactgtgactgtcaagggagtgacatgagtagatcccttcgtgtgtgcaaggccagggtacccctcgggcacagcctactctaaagagaccgttaatcttgtggctgcacgctgaccagcattctgccttgcaaataccaaaggcgctagcaagtttcagttgaaattttttacctcagaagataccatatttagggggaactttaattttggtcacttgatgtgacactagtattatagtgacaaactcgatggtgtggttgtgctcttgagtggcaggatcgctcattcatgtatttcaggcttgggagttgatatctcaggtcccctccctgacagttaattggaagtcacgggtgcttcaccaagcctgttgtccccttttgccttatatctgctgcttacctgtcccccattgctgccaagtttcatcccatggtgacaggaaattttgtctgacttaaccactactatcttcttactgccaaggattatgcagtcacttgattaatactcttaaaagattgtgtgaatgtttaaaatcaatcctttaatgggagcataaataagtaaacttaacaaacatgatcatttccgaggtctggtgtgaacccaggtttggcaagtagccacgagagtgcacactgcttgctcaacaatgtttcccttatgtattagcccatttttacctcacataaattgtcctgacttgaaaaatatttcttttgaaactaaatttcaagttataatctacatagattattttctgatccgaaattccaaaatctgaaactctttttggtgaaaatgacatcatgagtagaaagttccatcccgtgaggctttgtttcgtgttcagaattattcaaagtagtttttgaaattaccttcagctaagtgtgtgctatgcatgtgaatataaatgagtttgctatttgtattttgacccatcaccaagatatgtactgagttacatatatgtaattattccaaaattccttcccatcgaaaataaccccaagcatttttaatccataacattttggattgggaaatatcctatatatggctatcactcatgaagaattagttacagactatatgcacatttgtttatcttgttcatgctcatccactggtttgtctgacgttcttttttttatcatagatggcatagcaactgccatgttctattggaagttaatgcacaatgaatttgtcatgaaagaacttgacctaactatagagtacgccccttactctcattatctgcagtagtcctgttctctagggtcaccacaaaacaggatattaaaactgtatttctagatacccatgggcacagtctgcaccgatattcaggttctgtgaagaaaagataaccatgtagaaatgagcttggagaaaatgctgtgatagaattttttaaaagcagagagggaaacccagaagagccaatctcttcagtgtttcttagcttctctgtttaacatttatttctcttaagtagagggcagggccctttccggcattagtcttaggagctgatatttctggtagacaagataggtcagatggttcctccatggccaatgctgccacagaaaggtgagaggaagttagaatcatgtctagattttattactggcatgggtggggagggtgctagctgttatggcctgccttggaaaatggagttctattgtctaagatggactgtagaaggctctggctcctgagcccccttcctttggttcaaagcactcagccatcatagcactacacttcaggactgaagtcctgacctgcacatgaccgtgcaagcactgcaagcattgcattggggaagacaagtgagtagtatctgatttgccggtcaagggtctggatccatgtggcagttgtttgtcccatgaacaactcattaaaggcataataccctgattgctgacaaatgtaggtactgtcttccttgccaagtagggtcacacttaaaaggcctacatttctatttccttaaaaggcctacagatttatttatgtataattgcatatgcataatgtattcagcactatgatggcacaggaagacagacaagactactaaagcccctggccacacaactctgatatttgtgtctgatacttccttcttgctcatataatcaatcccaaccctgttgattgctatcttacaaatacttttaagactgaggttatcagagccgtgaagggatacgaggccggatctgctagttgggatgctaaaggcttcagtcagtgtgtgagttgacactggggttctggtgacgtttctagagaggcaggttgaaagacaggcttgaagatgtgctgcccacaaagggatgcagggttaagcccatgtgtgcatttgttcagccatgcctttggccaagcagttacaaagccctctctgtgcccagcaactgtgttaaattaaaccctgggaatacgagtgtgaatgaaatgtcacctggcttttagtgggtacagcccttgatgagaacttccttggggagcctggttacgcagaagaattggtttttctcctaccaagaaacacttatttaggaatattataatgttaatgtctgttgttatccccattgtaattcgttttcatgaagccatcctgatattagctctgaaaatttttgcagcacattttccagtagattaaccatgtgcaagccacatgcccccctaagtcccagtctcacacagcattccttctatttagcttgtgccatctttgtatacacagatgatgttaccgcagcctcctgcaatgctatcattagttgtgtgataaaaatcaatgagcaggatatggacctccctaactacagcatagcattagctgaatgtcttattttgttttgtttgctgtgaaattgatatctatacctatatttctgtgcatgctcccatttctgtatacgcatctatttcttccaatgcattgttatgtcccgtaccccttttgttatgagccatgtaccccatgatacaataggtctgtcaaacaagaatccccatcacttatctgctgactcacactctggctgccagtgcatttatagccaagaccatacacacgaggggaagctgactgtgaggactcaacacacagatgagctagatgacagtgagatggtgaagctctggagaaagatgcttcaaaacagagaaaggagcaactcaaatgcataattctatagtttagaaatgccctcactgacccaagtcaattataagtgacccctggaaaagcaactatgtaagactgttcctcatatttactttgacagatatgtgcacttaagagtgcctttgacagtagctggcactcactgagtacttactgtggtggaccctggttctgttgtcatttgtttgttagacgatgtgtctattttgtacacagtgacatagagctgtctatagagctcagtctggccctcaatgtgtgatcccctgcattagcctccaagttgtagaaggtaacgagcatggcagagattttgtggcttatacaagatcacaaagcttctataagtgcactgggctcgcaggcagagctgccttgggagtctatggctcagagagcctttgggcaatggctgcagtcagctgcagtctctgggcagtaggcaatatgcagtgagtcctgttctgtttaggttccggttgacaatgtgttattatcagttgatacattgaaaagttgatcctttcaaagcatgtacaagcggttcatgaaagaattataataaatcctaggtcttgcggatttaggagaatacaaaaaatagagcactcaaagctgctgttccctaggcagcttggagtgaacagagaggaccgtcctcagctacagcaacagctgcccactgtgtgtactttggataaaactgtggacatggtgtcatcccagagctttcccatgtgacaagagtgtgacaacctggctgcctgagcagctttgccaaaggcgtcagtcatatggcagccattgaaaccatgagtgttctaaggggaagtttgttcgcagggtggtcatctgtgaggacgagatagccaagcctcacacctgtctctggaggagtggagaccctgatgttatgaggtttgtggggcagaggaacagaaggacctgtcctggagcatagccacaattccagcatttgtgaagcaggcagcagtagccagagtttgaggccagtcaggtagcagagttgtggacagacaaggctacatgggaagccaccataccaagaagaaagaggggaagaagaggagatgggtgtcttggggcatgtgagaacaccggtggtcttcacgtgtatactcagatcttcctagctcttcatagctgttcatcaagtggagttgagtgacctggtgagacttcatgaagcaccaggccctcagatgtcagcgtcactcatggacgcctgcgcatgcccagatgaagacctgcagacttctgggaaagcacccttggagtccctgtaatgtcaagtggccaccattatcatcccgatgaacacagcagcactgtcacctacaccagttaataataaatgtctcagcatgtggcctccagagtcagataaagtaactcagatcactcttagaaggttggtttaggctgagtttgtatgaagcctatcagatactttttgaagccgccccatgagctcccacttgggaagcagagggaatcctgagggctagctagtaagagaatgtggggggtttcagtcgggaaatcattttcactaacagcatgtagcatccagtcagatttccttatctactctaatttttagttctaagagaaaattctctgtgatgttttaaactgaatatattaaaatcatttaaggtggtcagtatgtacctaacttctgattttcgccctactctccgggctatgtccctagtgcagggccattccactatgaacgtggacatggaatttttatattctcggctgcgtccacctgctgaaaagccttaaacaactagataaacacacagctgctgacctcacgttcctacacgtgggggcgaatggcccaagtaattcattctttgccattctgacttgggtttgaaaatgaagctgggcagcattccagcacaaagagccattcagttccaaagactcctaaattgtcccaaggagctccttgtggcagtggatgatctgtgtttggctaggtgtcctaatagcaaaaactgtctgcgcggacaagcagcagccaaggcagggtgcagaatctccatccccggtgttcttcctgatgaggttgtttttcagaaaagcaatccccaaccctgtttagcctgactccacaagagcactgtgcaagtcgctttcttgaactcacaaataaatagctcccgatggcagggtgactgttttattgtatcaggaacaacttggatggaacttagagtcagtaccagaggtttcctgagaccaaagctgtagttccactacaacactagcagttacttaccagctaaggccatgagagactggaaaataaaaaataaaactaaagggtttctggaagatctttcttctacaggacacagtgggccaatccacatccatccacatgactgtggatgtccattgtctggccctaggcaggattaagtcttggtaccggtggttgaacagaaggcagcacactgtgaactgaggcccacacactacctgaatgcatgggagggggaggatcctaactcagagaagtccaaaattaagagtgcaagagcaccaaaggacgtaaggaagcaaagcccagaacggctgagtatagtcattgtgaatctgacctacatatgtaagtacatgtgcatgtgtgtattcagggtacttgttgaaaagacaattactcacggggaggtgtgatcaaagtcgagtttcatcacattgctccaaatgtgtcagagcatcagtgcggtttactccgttggccttttgaaagagcaggataagtagaccatgagcagactttgaccactgatggactgagaggagaaaacacgagcgctgagagccttactttatcctgctcatctccagaaggaggatgcaaggtggacaacccccttctaaagctaggaagacaccactgcggccaactgaaagaatgaattgtttccattttataaacagaaaccggctgggttggataatctgctcaccctggtatgggttgtagcagagcatctttcagggcactgggagattttacctgttattcagtttctgattgagacttcctggttgtatttcttttttgtcctttccagggtttgatctgtctttccttctggcattagctttttgtgtattctctttcctttatttccttgctcagcctggttatcagcttctcagttttgttgatgttttcaaataagtggattccgtttttgatgtttctctttccctgtgtcatgagcacatgtgtatttatgtgtgatgtgcacatgtgtctgtttatttgcgtgtgtgggtatacatgtgtgtagaccaatgtacacatatgtgcaatgcttgtggagtcctaaagttgacacagggcatcctcctccgtccttttcactttgtttactgaagcaggtgacagtggggaaaatcagagggcactcaggtgcaatggaggctctcttgcctcaggagagcataacttaggaagctattcagaatcatcaacagcccccaaagccaccaccagccagtggcttccagttcctatgtcttgcaaacaatgaatgaatgagtgaatgaatgaatgaatgaatgaatgaatgaatttcacagacagcagaggagtgagttttgttgtgggtgagagctcaaggggaggaagcaagtagaactgcaatagaaagagccatttccaaacaaggccaacacccccacccacccaccgacccagggtcccgactgagggcttggaaagtttcctgggctgcagcatggactaagctggtcaagccagctgtcctacccatgatctgtccatgtgtctgtccattcctgtgtctgcacaggaacttcgggtccaccttccagggtccatgaagcatctggtcattcccgaaagctgtgttctgttcactgtcattgctgcataaaagaagaaacatgagcagccagagcgcacactagtgtccctgcctgaatggttttggtgtttatggagtcacaacaggacagaagttctagtagaaacaagaacatttccaggttctggacaaggcagagctggttccaaggacgaggaacagaactactcattttaaggtccccacatcagaactgtctgattcgtttctgtttcctgtttttatcatggggtctgtcactgaagaacctggggcttacgggttacagctagtcttcaccctgtctttgccctagagtgcagggatgatgtggtgctggggtccagagcctggcctgcatgcttggggtcaggagttctacctgctgagccatcttccctacctgattctagttttcacttccagatttctgcttggatcatcttcttctatttggttgtacagactcttcctggttttctcaaactggtcaggtcaccagctgcaggccttgtcttcaactctgtccttgctgctcttgttttttctcctgagacgcttttaacttgtaaccctttcagagtgcactatctatttttcaaacatttggaggtttccatgcatctggcattgatttccagtgtgaatctactctgttcagaaacagcactgtgtagtttgttttaaatttgttaaagtgtgtcatggtccagcatgcagtttatcttggtgtgtttctgtatgaatctgaggagaatgtgcgcaccctgcagctgtggatgaaaaagtctatagatgtcaattatgtccagttgattgacagcactgttcagttcaattacacccttgttgattttctacctgctggatctgtcagtcactgataaaggggtatggaattcaccaagtacaatagtgaatccatccgcttctccttcccagctctcttgagttttggcctcatgtatgttgaccctctgattctaggcacaaacacattaatgattgacaagtcttcttggagacttgacccctttagcattctttaatgactctcattatccctgatcactttgcttattctgaaatctattttatccaaaatgaatatagctatttcatctttctttggctaatgtgaatgtagtgtttcttttcgggccctttacattcactatttgtgttctatatttaaagcaagtttttaaaccatattatgaaggattctgttgtcttttatgggtcatttagatcatgcccatctaaaattattattaatgcatttggatcactacctaccaccatgacaacttttttcttcactacacttgccctttttaaaaataatttatttttaatcttgtgtgcattagtgttttgcctacacatatatcagtgtgagggtgtcagttcccctggaaccatgaatatagacagttgggagctaccatgtggatgctgggaattgaacttgggtcctctggaagagcagctggtgctcttaatctctgagccatctcttcagcctctacacttgacatttatttagttttagtttgtttttcctctttatctagcacatattctattaatcaatcattttataatatcccatgtctcccaactcttagctgcagtaactaaaatattttcttatagtcactccagagtgtggagtacatgtttacagctaatgggtccacttccaaataccactaccttgctgacagtgaaaatattttaacaggttcccctcattctttcctctctccagaccgttgcgtgtcacattggcgtcgtttgcttccctcatccatagctgtagtcaccggtcacatgactgctactgtgacttcagagcaaagactgctatctgatagattgatgaggaataagaaaaaataagatttcattttcccttctgacctctatcacatttctttcctctgtggcatttcatgtggaaagggtctgtttgttttgaaagttaaataaaatactgttatatacactcacaaagttgaagctactcacagttctgggttatagtgtccattgagttgctaacagaaaaatcactatcatgtgtcacacagacaacagaactttgtggttccggacgaagagctgtatgagtttctagctgctcgtagatgtctgaggtgtcagctgctgagccccacagacaatccaccaagtctgtgctgcccaaggaaaaggatttcattcagagttactcatttgttttttttaactgagtttctgttgcacatattatctctgcactcaggagcagtgtccacaacaactttcatgccacacaggcaagacaaacacagaatgacacatgcagaagttttcctgagatttgtcatcactgatctaaggcagagtcagatctctgtgtgtgacacatggcagatctttgatgacaaatggcagatctctgtgacacatgacagatctctgatgacacatggcagatctctgtgacactctggcatacaatgggtccttctgaagctttcctgagagtactagtaaagcgtggaccctctcatagccaggcaaggatggaagccctctcctagaccttctttggacagaaagctttggcaagaattttctctgataatagtcatactttcaggaagaaattaaacctctgtgcagtctgaccatttcttcacagtattcagggttggtgtaggagctacctctttagcaactttggtagtgtagcctacatgctatggaagcatccatttcttaatcaaatgctgctagtctgctactagcaaaactcacttcttctccacatgccttctaattagtaagccatgtctgatgcttccacacgtgacctctagtacagttatgaagagacatcacattcctctttgcataggttcagttagcaaatgtttatttggccaaatattaagtacagaaacccacctccaaaaccaaggcaaaggcaatcatgttgcacacttcttgaaagcaggtgaataaattccatgttggcatgtgaactgcagtgtgaggccagcctggcctatgttatgatttccaggactgccagaactacagtgagaccttgtcaaaaaaaaagtgtgaatttgaagaaagttttaaactgataaaaaaaatcttagctgctgagtgtgtgtggagggtgtgatggggaaacatgaagtgtagttgttaaaatccaccttacagttcaagtaaagccgagtgatgatgcagtaatggtaacggtatgaaccagtggagtctctgtgtaatctgatctctttcctctaggattttcagacagttctaccatcatttgacctcttctcaaagtatggaaagttatattcgaaagctggacaaattgtataaaggtatgcattgtttgccgagtacttgataatgcatatgaaataatcagtgccactaacttaagtgcaggtatttgaaaatgctgtagtcatatttgtataagataaaagtccataaattcctttcattctaacctgacagttttcagtgcttggttttattttccaaatgtcttccccaaaatggactaaaaatacatcaacaaaactaacagaagtctggggtattctttatcttttaattaaatgacataggaaagatttacacagtgcctgaaaatataccagtgttatccaataggctaaactgtttctcagtactatattaacacaatatagttaaaatttctttacttaatatgtgttttatttgaatcaccagatgcctcgagggataggaaagagtatgggtctctgataattattaaagtttgcaggatagacaggaaaaaagacaaaccactgaaattcaagaaccaaatgagctttcagtgatcctctatttatcactgagatgtcttaggataaagaaataattgcaatcaagctaagaccagtgttgtggtaaggttctgcacaacttaagtgggtatgagatgaaagacagttggcaggaaaggtcaagaataaaaaatgagtgggagggttgcccagtgtcctcccaagccagcagctgaggaaacatgttattctgttgggaaaagcctaactacctaaagccttccctaaatttggtgttcatatttcctttgccacatatatctttgaaggctctgatttggttcagatgttaaataccaatactcactgtttaactgttccaaaagaatacatgagagaaaatgtaaaatattctgagttagtagaaaaaatatatgtatgtatgtatcgccaaataggagcactgttttcaaggtttgaagtattattgccattgaatattaatgtatgtgtaagccataatatgttgcatatgtgtgtgcaacttttgactcaaacatttatcaatcctatgtataatgattttacaaaggaatatttcttgtgtgacactgtttctgggagtcgagcagtcttctgttcatgccagataaggaagtgatgacagaagaaagtagtcacaccaccagagtccaagctggtgactcagtgagtttattgattgcttaaaggagtcctggcaagaagttacttagaggagtgtgaacacctcaaaggcacctgcatcacagagagcccaccccaacctgggtgatagctcatgaaagatgcagccctggagctcgctgcatgaattgtatacagctcagtgggatagagagtctactctcctcagcaggtcttactgcgtatataaccttgcacaaagggaaggcctttgtgaatctgtttgacttcagggagtttctgacacttgtgagttgtctactccctgagtcttaacaaaccttctttagaaagaacttcctaagtcttaagaagcttccctctaggatgaaatgttttaattcagaagaaattactaagcagcaatattggaaccaatttagatgctcattaatatatagtaactttaatgacagcacatatggtgtaattctatgcttctgcaaaacgtgttaacaagttacctactgatctgataaagcgcctaccttgtatttctaggaaggctatgtttgaagccattctgcaatttgattgcataacaatggatgtgtgtacatgtgcatacctactgaaaaacatttctacataatacatacatacatacatacatacatacatacatacatacatatcagaaatgatagtggtggctatctctggcttgtaagattttcattaactttatttttcccagactctgttttatatttcaacttatttttaaattttcacttaatctgacaaaggcaatgttaaaccaaatttttcagtaaagtctaatagttttcctctacaattacaaacatgggaccattacagtttactcaaccatgataatttaaaacacaagttattttttctgaagataaaatacctgctaaattatttatggtgaaagataagagcaaaagtaacaaatttcacattggttctaattaaaaagcctgggaaatacaaagacacaaatttgtggcaggatttaaagaaatggttaatgactactcttaatgttttaagtattttgtgagttagcaatattattaattttctgcatttgcctttttaactgatcctttttatgacctttaatattttcccaagtcaatttcacctaacccagtataccctgggcactgtcggtgttgtgctatcttttcagccccattcaccccaccagacaggaagtctccactgtcacgagaagctgagatcattgtttgtatttatgaatggggtcccatgcggcatgcatgggagttttcctgcattatgtactgatgaatatccccagtcttgtaaggaacaggctttggcccagcctatcttctcgctaaaatgtggaagccagatgagatgagtttttattaattaaatgatgtgttagacatgaaaagcaatgtgcattttttctactttctgtgggaatcagcatatggataactcaactttagaatgaaaaataagtatagtggacacctgggttgggaaagggaaacatagaaacttcattgccatcatacagaggaaacagtatttcaacaactggataaggaaaagagtgtgtaagggaagagtggtaagcaagcatttgagctacagattcgcctgctgggggttaaaattttaatctactaagaaaaagttataaagcctagccactcatgtcagcactgtgtgaatctgtaaccataagctcagtcacagggaactggcaaagaagagcgtgagaacccttccacacttccgtatcactcaccggtaaactgccctcatactggagatgctgcttgtcactcaccagctgctcatgggaggggttgcctggggtttggagtaactgaggcagattgttagacacccatgtatagtgacaccatcttctagactgctaatctggatgtgctcagaggcaccagagtgcaggggcaataagtacaaatgtcagggtcctggcttcctcaatgcagggcagtgctaaagctagagctcttgcctagagaatagtttagagaatagttttaacaaggtgctcttcctctcccagtgtgctgcttggtcttagagaacagaagatgcaatgtagaaacaacatgaagatgacctgagcacaaatagaagatgccactgcccagaggtccaagctctacctacatgatgaacgaccttgacctcaatccttgacctctgtgttctctcaagatcaacccctcccttcttccttcattccctccactccctccctgcccactccagttctttctcttgctcccactttctcttgtgtcagaagaaaagcttaaaaccatttctggttcattatagaactttctagtttgaaaggaaaatacaaaggaagatcttataaaaactaatcatatttaccaataagccagactcactatgatcaataaactatgacaatcattttacagattatgtgtatcttgtgggggaggtgacatgtatgtgtcatgtgtggttatttttgtgggcacaggaggtatatgtgagtatgtggtgtgtttagcagtgggagtgtggaatatttcagatttcttcatatatcttttgggacaacacacctttgggccttttacctttgagaatgcctgcaacaactatagcctttttacccaaagttccataagtgggtctattgaagtgacgatattctgacccccatcactcttcttaaaagtcgtgaacagctttggtccccgtccctttgttactggacaacaattaaaaatagctgatgcaaatagaatgacacatgatttgaagtatggatagtaaggaaattagcataaaagttcttccctgggagaaataatgacacattatcccaactgtacctccatgtctattgtatgacactatccctgagagggatgaacaaacttcattcagcccagacagacaatcaacaagcaaccaaagtgaggatacaatcccaatccaaattgatgagccagggagttttattgaggttacttgtaggaacagaaatggatcaaagaaagacaactgcatcaccgaaagcccaccccagtaagggtgacaactcttggaagctgaaacctagggcccaagacacaacttgcaggcagctttacaaagtgaaggctgctcacaggcagctttgttggcctgaaaccttttcaggcagctctgcttgtctgggagtgtcttctcagcagtcctcctaacctaacccttaccctaaagtttctaaacttagaagagggaggagacgagggcagctggtcagtttcagagacttcctgaaacttctgagttgtttagtttccgagtcttaagatctcctttcaggatcaaatgtttcatctcagaagaaactgctatacaacaaatgtccttgaagctgagatacaacagttacagagtggtgggtatgtaaggcaaactcaggttttctcaaatgagaaatgcgtttgtaggcctgattagatggaagcagtaacaaggtcacctggttttgtgactctcaagtgtgacttgttaagaagccaggctctaataaagttcttatttgtttcagacaggttgggttgagttttccgaggatgtttattttaaatgaacaactgaggttctcatgtcccttggttccatcccaaatgcatcctcacagtgaaattttctaccggagctgatgtgacagttaagactgattgtcaacgtggtagggtctagaatcgcataggagacactttgtctgcaagcatgagggcctgaggtcaaatctctaccacccatgtaaaaagcagagaatgactgtacaagcatgtaaactcagtgctgggcattagaaacaggcctatctgagtaattgctgatctgtcagcctgtctgaaatagtgaactttatgtttagtgagagagcctatctcaagggaataaggtggagagcaagaaaggaagatacccagtatccttctcaggcctgtgcgtgctcacacacggccatgtgtgcaggctctctcgtgtatgcacatacaaaacacacatacacaacacacactgcagtcgttctgtgatagacaaatgacctgttatttctctttttaaagaatatcctttcattgtttttaaaattgtaaactattgcctcattagtaaagtgactttaataaaccattcattgtctcacattctaatttactcagtagcctaaaatgcacagatattctgaaatatttatgcataaaatgttccaattttaatttttgtctttgtaaaagcataaacataccttaagcaaaaaaacaaaaacaaaacaaaacaaagcaaaacaaaaaaaaaagttccctgaataagaattttccttagaaacatttccctttatcaagtaggtcgagcccactttacagactttgggtgagaaaagaaggcaatgagacctaggatggaagccagtctccagactcctccccaatgctgtgcgctgaaaccctcaaccactcctgcagcaagctcagacaggaggcaagaggaaggcacaaagggaaaagccgtttgcttctatgtgcatggatgggcctcgacagacacctcaggagaaaacaggtaagaaacttgaaggtccaagtacacagcaaaaagtcaagtgcttttcctttctgctcctgttacaaaagagtagatttttgttagaacaaatgtcaactcggaaagaaacacaaaatgcaagaccatgtgcttgactaagttaaaatgacatccttgcgggaaagccaccagagaggtgtgagcctcctctgctccactgctcttcccctggaggcatttctgggtttttttttgttttgttttgttttgtttttaacactgcagagccaagggtccaaaatccaggcagacaatgacagagaggaaattacaaaatgaagtcacctttggagcctcgcagagctaggcaactaaatggtgagttcctgggtgtgggggaggtagagtcagtacgtaaaatacagaatacaacagaatcgccactgaaatctataatcactaatacatgataatcccatgatgctgagtccaaaccgctggacacaaaatgcacatcaagataattgtttcatcactttagagcaaaaaacaaacaaacaaacaaaacaaagcatagcttatccccatcagacactgacaaagatcacagctgtaaaatgtatacagaggacaagcagagctggcctcttctctaggctccttccttggtcaaccataactgcctatttgaagtgccggtgacacgtactatgcctgttgtcatggcaacatttcttgcctagcttgcctagcctcaactttatcacccaaaagttggaataataattctttcagtcctattaaaggtttacagtcagttagcttgacccttctgattcaacatcttctcagtaaacaatagttaccattgtttgggtttctggagtactgtctggagttgacaggaacctagagggagctgtgttgacatgaggcaaaggcgagcacctgtagcttccacgcccacactttcctgtcactgttgtctttctcctccttagtaactgccttcctgacctaaatctcctcctctgcatctttagctactaaaagactgtgagcactgagcagcccgacaaccacacctatcacccaccttccgtctagacttactctttttcctctctgacatcatgtaatgcgtggctttagcttagcttttctagacatagcaacaaatgtctgaggtagcagactcagggacgctttgtctcatctcacagtttcagatttagtccatggttgcctggccctggcttgtgcagaaccctgtagcagtggggatccgtgacgagaaccttcttgatcacacggcggacagaaagcagacagaacaatgaagaggaaccagacatgcctgggatgtggctcttaggacattcttccaggtaggccccacttcctcaagtttacagaacttcacaaagcagtgcctgtgtcagtgggccaagcattcctatgtcggagatactgtatcttcaacccactgcaacactcaatttctaaaactatattcctgtctcatggaaagtatggtatgaatttcaaaaatttctgtggactggcttaagcctcattgatggttgatggtagtgtaatattgttttctttggggcacatattcgtaattcaaaccaactaaaaagggaagtttggttcacacctctgtttttacatgaaacttctgtactgccgtgttccgaccttcagtttaaacacacactaaatggtaaggatgtgcccatgaagtgaaaaccactgatcattatgtgttcacattagcttttgtgtctcaaattttgcaaacattacaagtaataatcttttatatttcaaaatccatgaccttacatttttgttaattccttctggaaaaaataaaaacaaggcttgacagacaaaagcaaatttgaacagtaaattagacaatgaataacagcctcataatgggggattcacgctctacattttgaccacctaaaattaacttaagccatttaaagtacatttaaatctaggtacagtggtcccaccagattcaggaagctgagacaagatcactacaagttcaaggccagcctaagttcctaattaattttaggccagtcagagctactttctcgacaaaagggcagaagaggactaggaagatggctcaagcttgacaacctgagttcagatgcccagaaaccgctaaagctggatgtcggagcatgtgtctacaactgccgtgttcccaaggtgagatgggaggcgggaaccttggaaactcacaggccacgtagatgtggaacacggcacaatgtggggcgggggagaccctgccttaaacaaactgtgagattgcccccacccctccacacatacatacacatacatggtgtgtgcgtgcaccctcacgtgctatgccccacccctccacacaaaccacatggtgtgtgtgtgcgtgcaccctcacgtgctatgccccacccctccacacaaacctcatggtgtgtgtgtgcgtgcaccctcacgtgctatgacgtatgcacacatcacacatgtattcacaaaaattaatacctttcaatgcatgcatgcttgcccatcttttaccaatatttacactggcatctataatgtttaataatcaactatctgtctcagtgaattcacaattattttgattggtatttccaaaaccgtgtgaatttaggactaccattcctatataaactcagcaaataagacaggaaaatagcaaaacagagaatatgctgagatctaagctctacctgtgattgcctgtttcatattgctgagagcagtcctcacagggccatgctatgtcctcagcatgcagctgtgtcacagaatgtgtgcccattagctgttgtccttgtagcaaatcattgtattctcaagagacaaagtacaaggaaggaaccaagacgaaacctgaaatcacattttcatatgaagagcacaattatttttaaatatgtctgactgtgtatatgtccatgtgtatgtttgtgtacatatggtttcatggcaaacattaggatgtaattaaaacacctgaaacatgtcatcagacaccacccacgggaactctgtgttcccacatttttcattcctttctgaagctactggcttcttatacctgaacattcattctccctttaaggaaaaatgtgtagaaacgaagagaatgtccaaaagaggaaaggcaacgataatatatagggaagagaagccacagcttagctaggactccccacattcatcaccaggcttccaaataagtctctgtcgtcttgacctggcaaataaaaaaatcacaagagatgtgcgtgtgctgctccgtctgcagcatggcccttgtgccagtttgaagatgggctacagagaggattagaaatttgagaagtccacatcagcatgggcaccaggctttcctctctatctcctgtgatcttctcccaccgcttgtactctgtgagaaagatgctgagtgctagtggggcaataactaatcgcaggcctaacctttcaaggcaaccagttggtttcaaagctacattccgatacggcttggcaagtttcattttgtcaaggactgcttgttcggatataccaaaatttacacactgtaatcccaaattctgatttttaaaagatgtttgtgatgattaatcttgtcaactagagttgcagcagaagcaaatatctggacacatctgttgagagtttatctacatcaggttagctgaggcggggagactcacctgcatgggagcagagtgcgcaagagtcccagcctcaacacaggagaaactgagccgagcaaggcccctgtgtgcctgcctcttgccatagaactggaaagactagcccttcttgtcctgttaccatgcttccctggccatgatgggctatatttcctggaagtataagtcaaaataacctcttccttcctcacatagccaatgccaagtagtttgtcatagcaacaaataactaacataatgtttaatgtttaatttcaaatgtatatttaagaaaccttataaattggaagtactaaaaatttatctaataattgtatatctttgtacctttgattttattgcaagtgatcttaccatacagaaggtatagttttccattgtttgtgattcaaggatgtatggaaaaattcccaggaaattgtttcccctcatcctcctaacaattccattgtctctgcctgagccctccaagtcttagaaatcaccatacttcttgggagagggttttctatagtgggtttctgtaacttcattaggcctgtgtcatgggaagcctgtggtctagctccttggttctaacctagtgctttagagcaagttggtgttttgttctacatggctgtcccttgcatagttggaaagacacccatgggttctttctctcttcggtgttagcacctttaggctcctcaaatatgccctctggttggctccattctctctccatgacagacggtgcttctcctgaccctcgagtcctttcgcctaaagtcagaagcccctgccatctgaactggaaaccaagttgaaacctgtttcccatctttcaaattctggtttcaataaaataaagctcagtggagacagtggtggagatttgggctttttaagactttgagtgtgcactgttttgaggtactggcccaatgtagtgatatccgcttccacacctgtagttctccctgaataagcttctcttcacctgagttcctcacccatatcccaaggttgatggcagtgctctctttgcttcaaattaaggtaaggaattataataggataccaacggtgtcctccataactcagattccattataaagaactgttctgagctcgtcatggggaacaaaatacctataattggtaaatccttagtgctagattgctaagggacaatgccaatgaaattccgtggcaatatgaaaacattatatgaattcatatttcatttgacacaagacataactaattagtttttttgtaattttttattttatcagttcaaattaggaacaagcttgcttcacatgtcaatcccttctccctctccctcgcccttccctccccccaaccctccttcacaacctcccacctgacccttaccccatccaccctccactccccaggatgggtagggccctcgacaggagcttccaaaagtccaccacatcatcctgagccaggcctaggccctcccccatgtgtccagggggatatatactgtctgcctctgcttccatcagccactggatgagggctctaggatggcatataaagtaaacatcagtctcatcataggggaagggcattcaggttatcctctcgaccattgcctagattgtcagttcatatcatccttgtagatctctggaaatctccctagtgccagatctctcctcagacctataatggctccctttgatatggtatctctcatcctgatctcctctattcttctccccactcaacatttctgctcatccactttctcctctcccctcctcttctcctcctctcattctggaagctccctctcccataccctcatgctcccaataagctcaggagttcctgccccttcccattcctggagtccatgcatttttcccttagagtccttcttgtttcttagtttctttggtgaagaggattgtaggctggcaatcctttgctctatgtctaaaattcacatatgagtgagtacataccatgtttgtctttttgtgactgggttacctcactcaagatggtttcttctagttccatccatttgcctgcaaatttcgagattccatagcttttttctgctgagtaatactccattgtataaatgtaccacatttactctatccattcttcagttgaggggcatctaggttgcttccaggttctggctattacaaacaatgcttctatgaacatgattgaacatatgtccttgttgtatgaatgtgcattatttgggtatatacccaagagaggaattgtatctacattctcattaaattctaggaaatctttaatttcttttttatttcttcctcaacccaggaatggtgaaattgggtgttattcaatttccatgagcttgtaggttttctgaaatttgtattcctgttgaattctaactttaaagcatggtgatctgataagatactggggggggggcgggttgtaggagcaggagacccaagggtcctcagatctaggtttcatacacagcatcgagattgcaaaagcagtggcaagttgtttgacatcagggatatattcattagagggcatttctgtgcacacgcacacgcgcacacacacacacacacacacacacacacacacacacacacacacacactagtacacaagcctgcatggtacagcctgtcacacacctagccttggtaactatagcttctcatttcccacactacagacctatgcagaatattgccacactaaacactgtaagtcacagtgacttaaactgtagactgacccccctatgaggctgtatgagtaattgtgtgggggaggctatgtggaggggattgtgtgtgcggggaggatatggtgactgtgacaggtgaatggaaggtgtgcctggcactgattgaccctattgcatcacaggacttcagtgcagccttggttctgacacacacacaacataggcagcttgtatctcaaagctatcatatcacacaatgacagcagacaccacaccggctcagatttgagactgctgtatggtataattgaggaaacacaatggcttaactaggaagcaaggacttaatattttcctaccatcactgcttttccagttaagcatcaaatcagtttacctccggaaggaatatgttagaatatttgacttttaaaattgatgcttgagtttctggcttgtgttttgcgggggagggaatattaagtgaatttacccctgggattggggcagaattttcaacaatttctttttctttttgcctaagatttaatttgttatataaaaataaataagaatatccttgtaaaaaatgatatgggggttatttcaattcttttgtatctgtgggggtttgctttgttgcccacattgtggtcaattttagagaaggtgccatgtggcactgagaagaaggtatattcttttgtgtttggatggaatgttctatagatatctgttaaacccagttgggtcataacttctgttagatcttttgtttctttgttcagtttctgcctggtgttcctgtttagtggtgaaagcggggtgttgaagtctcctgctataaatgtgtgtggttttatgtgtggtttgagctttagtaatgtttcttttacaaatgtgggtgccttcgtatttggggcatagatgttcagactgagacttcatcttgatggacttttcctatgatgagtatgaaatgcccttcttcatctcttttgattgattttagtttgaagtctaatttgttagatattaggattgctacaccagcttgtttcttgggtccatttgattggaaaatcttttcccaaccctttactctgaggtaacgcctgtctttgaagttgaggtgtgtttcttttatatagtagaaggatggattctgtctttgtatccattctgttagcctgtatctttttataggcaggttaagaccattgacattgagggatatttatatccattgattgttggttcttgtttgtttttgatttgttggtggtggtgacattgtgtgtggatttcaccctcctgtttcttttcctgtttggtaaagttggattatctattgcctatgtttttgtgagtgtagttatcttggttgggttgaagttttccttccagaactttctgtagtgctggatttgtggatatgtattgtttaagtctggttttgacatggaatatcttgttttctccatctatagtgattgaaagtttttctgggtacagtggtctgggttgacatccatgctcccttagtgttggtaggctatgtatccagcaccttttggctttcaaagtttccattgagaagtcgggagtgattctgataggtctgcctttatatgttacttggcctttttcctttgctgttcttaatattttctcttcattctgtaagtttggtgttttgattatcatgtggcgaggggacttctttttgtgatccagtatgtttggtgttctgtaagcttcttgttctttcataggcatatcctttgtaggttggggaagttttcttctatgattttgttgaatatgttttctgtacctttgagctgtatttcttcaccttcttctatgcctattattcttaggtttggccttttcacagtgtcccatatttcctggatattttgtgttagagatttgttggacttgagattttctttggtcgatgactttatatcctctagagagtcctcaacaactgagattctctcttccatctcttgaattctattggttatactcacatatttagttcctgatcatttattcagccattctatttccagcatcacctcattctgtgttttctttattgtttctatttcagctttcatgccttgaactgtttcaagtacttccttcacttgtttggttgttttttcttgtctttctttagattcgttaagagatttgtttatttcttgaaatttttggtttgtcttttcctccatttcatgtaattttttgcttgttttttcttctatttctttaagggattttcttgtttcctctttaaaggtctctatcatcttcctaagataatttttgaggtccatctcttcttcatcctctgtgttgggcttttcagatcttgctggtgtggagtccctagattctggtggtgtcatgttggactttctgttgttgagtgtgttcttgtactgtcgtcttcccatctcttcttccagtgggtgaaggtggtgtgtctctatctcctcttgtcacctggtggtgtgtgtgggccaagatttcaatgtctgcagctctggatggtcttgcctctcctggtagtctcctcactctgtaggactcaggctggtggaaaggggaaggaagagtgaggtgtttccagactcagggagctcctccctctctgggctagtccactctaagcaggtgcaggtgcaggtgcaggcccagagagatcggggtgaatgtgaatgggaagctgggtaggaataggacaggagcaggggctgcactcaccttggtaggggtcaggccggcagctgactaattagttttttattcaagtccttatatttcacagctacattaaacacttggaatctagaacattcttatctgacagtgatacataattaaagtttacatcatgttttgatgagaagtttttcaactttataaaagactccttgaagaatatatcactcagaacgctaacttcctccctcattctccgtcatcgcgtgccaagagatctgcagaacatcctgtctctgttcaatgagatcatgcacaccgactgccagactttggagaggccagtagctatgtggcctccgtctgtcaacagcaaggaaaaaagacttcaggatcacaaatcactcagacaactttgagaatctttctttggaggtaactttttgtgacaacactagttagaaaaaatagaatgactcaaataattattaagtctagtagatacttttaaatcataaagctgatttcaaacaattacagcaccttcttcattccccaccccatttgacctatgcattttatacacagtgatggcatgggctaaataccaaacggttcccagggctgaaattcattgcagtagcagctgttttctttagttaacaacttggaaagatggtctaaaaaggcctgtgctgcagaatatctgttagactatgtaaaaatgtgttattgctttaccttgcttacttaagtcacctgactagtctaataaaaagctgattggctaacagcaagggaggaaatatagatgggacttccaggaagggagagaaattaggagaaaaatttaggtagggggaggtggggccagacagacatgcagagaaagcaggaaagtaggatgtacagaaagaaagataaaaagccccaaggcaaaacatagatgaataggaacaggttaaaataagttaaaagagctcatgggacatgcccaagctaaggctgcacatttataattaataattagtttctgtgactttatttgggagctggttggttccccccacccccacaaagaaaggtctgcctacaagatggattagggggctgaagacacctgccaccaagactaacaacctggatttgatccccagggcctacagcttccacaagttgtcatctgacccgaaatcacagcctgtacccaccccccaaaacagtttaaaatgtaattcaaagttcaggggtgtatggagacagctgagcacaggaagcacaggtgttgcttccacagaggacctcttgagttcccagcacccagagcaggtggcttaaaaccatttgtaactccatctccataggatctggtgcccatgctggccttcatggacacctgtgcgctctctctctctctctctctctctctctctctctctctctctctctgtctctctctgtgtctctctctctctctctctctttgtctctctctctctctctctctctctctctcacacacacacacacacacacacacaattaaaaacaaaagacaaaatctttttataaaatgggaaacaatgtctcagtattctcattgtgatgacactggtttacagatgaactccaggatcagcacctcagacagactactgctgagttatgggacatatgtatggggtaagtcttccgcatacctagggttggaaggaagtcgatttgctctgatttccattaagggaaacgaatgtatgatggctacctaaaaatgtcgtggagcagtgtgaaggtagagactgggcctggaggtctgggttctacaattacttcatcagtgtaattctttttaataacttgttgacaccaaagtgtagagaggtcagcaaataaggaagtaatttattctaagtgactagctgataacacaagccttctgctgattggctgtgttcctgaatgaaacactacccagtaaacccttaacttctgtgtcggccatcttgttgcactgacttgacacatcaggatttctggggatggatgtcttcctcgttgtccaatggtcaggaaacagtcatattcccattacccctgtcctgtctgtacttctaggcctgcgttgacacaaccagatggattagcatcctaaatctaaactgtttacaaaattcttatgaataagcagatgctttattaatgtggacttctgaacctgggacccgtcccctggaatgattgattagagagtgtggtgagaagtcgcaccgtgcaagagcgatggtgggtgcaccgtgagcataagccatgtgtttatccccagtgctcccaggggaaaatgctcaaacaagaatgtattttagaatgggtgaccaaataaatacccattgcctgctcccagttcacagtggaatctacatctcactatgggcatataatactttttagaagtatatggtaggcactggagagatgctcagtagttagagcaccacacacttcttttgcaaggcacccacactgagcagctcacagtgaccgctaactcttgctcctgggaaatccaacacctctggcctccacaggcacattttcacacacagtcagacttacacataattaaaaacctgtctttaaaaggaatacagtgtatcagatctcccaaattgtggattattcctgaagtatttttttttctttgagacagaaccctgggctaccattcaacttttctcacttcttttaggtcttgtcctcagtatggacttgagccatgttttgtcatccaaattttacttaaataaatctggagacagtgttggtgttgttagaacctggtgacatgtcttggagagtctcacccactaaaactagaagggaatgtatcaggataagcgtgcttgcaatacctgtattgtccacacttggaaagtagaggcggggatcatgagtctgaggccagcctcagctacttaaagtttagggagttgtgatgaggctcacatgctcattctcctgtttccaagccgctattgataatgccaagaaaggtgtctttcaaattgctcgtcttcatgctatgattggactttgagttgttgaattcagtcattggtatcttatcccagagttgctcaaaacaacaggaatgttattctctccagaagatgaccatgagaaatccctccagagacctcctcccatctggtaagggcagagtgactggatggggaaaagagggataagctagcctcccaaagctattctatactttctcctgtagtgctctccagccatgcgtgcccagtgacatcattggtgttgtgctcagaaatgccatgaatccgaggggcttctgaacagaaggctgtagtaatgtttccaataagtctgctctgtcattgaaagtagaattttacacagcacgtgtcagggctcggctttgacatgcccagctctttgaggtaaaggaagctgaaaggcatgaagagccttagaatcaaagtctccccaggcagctcctgtttctcctgtgaaatcattcatccacctgaaaactggagccaccagaaaggaagagctaactttgatcgcaccttaaaagtccattgagcaggaaagactaaaccccgtgtcagcaaggaggattaaagagtggccccacacctagacaaatcctgtcgcaagccatattctgtcctttggtccattccacttccagggagaatgagaaaccattgatcttggggcccattcacttcccatgaaaagtccgtaaaaccagctacctccccattccctgcactgctataagaaggtgtgtgtaagttctgagccttcctgggtctggtgtgttctggggaagccctgtatacagtcaccttatgtctcttctcttaatgtgtctattgtaagttcatttcagcaaaccttcagaaaacagggaggaaattttcctaactcctacctagacttgaataaagaaaaagaaaattataggtcatatgcagatttgtttcactatggagagcaaaggtgattcttcaagttgtaactcatcgatggattaccttgcaagggctcacagatgtcaggctgcactagttacggcccaagcaggacacaaactgcacaccagtttaaatacaggagttgcaaggaattaagagctatcactaaaatcggtcagtcaagagactggccagtaagaagttgagagcagcaggtagaaggagcaggccccagctggagcatctgaggaagactccatatcccacaggagaaggagagagcaggccctagctcactgagtgtgctgtgcagtcagaatgtgctgtgatgttatgccttagagtgctggggaaagctattcatgggtgggctcccaccagagacgctgtgctccgagggagtagatccaaaactggctgtggttgtgtcacacgctgcagaagcaaatgttggaaaagagctgcccatattgtcgaatgctagggtgctttccaccctcacaagagccagatgctggacaggaagaacgacgtccttcctgtctgcagtgtctctctactgctctctactgacaaaagagttagtaccatgactgctgaccaaggggcaaatgccaaaaggaacttaaagctctgtctgcacaaaataggtgttgagggggaagtggcgctggagtggagaggagagcagatagactggagaggagagcactaatcctttgtgatgcagcctttatacttgagtgatgatggttagtcttcattatcaacttgactgagttccataatcacctgggagacacggcatggggtgtgtctatgaaggtgactccagggaagtttaactgagttacatttcaccccaaatgtgggtagatccaacccatgagctcccatgtttgttaaataaaaagagaaaagtcaaaaccgagctgagccccaacattcatctctttctgcttcctgactgcacttgcaaggtgaccagccccatcctgcccacatggttctcaaccttcctaacactgcagttttctaacagttcctcatgtcatggtgatccccaaccataaaattattttcattgctacttcatagctgtaattttgctactgttgtgaattgcaatgtaaatatctgatatgcaggatatcagatatgtgaccctaaaggggtcatggcccacaggttgaaacccactgtattatacttttcctgccaagatggacagtagtaaaagcctaaataaaccctttctcattcatgttgcttttgcctggtatctgtttatagcaacaagaaaagtagttaatataaaactcagtatcatgcttttgtctctgaagttctcagacctgcacagttgacttactccacctccatggcaatgcttatgttttgacagtcagttggtattttctgtagttatgacttcattcaaatgttcgaaccctcgcttcctggaagctgtctctgagcaagatcaaatctatgcttcgttcagcatctttctccattgcaggcagcaccaaaacatctggagttagaagaaacaggacacataggcggcatctcacaggacgcataggcggaatctcacatgtcccaactgagttcctggagagacactgagtgagtctcagaagtggacacacagctgcctttatgttctttgcctacaagggtggccatgtttcttcagacagttttatgaaaagattcagtgatattgaggataattgagacatcttcattcttaacgataaagattgtggtttcaaataccgaattatagttgggaaaataaggtgtttaaaaatctgtttcattgatacaatgtgtcacatatggagaagtgtgttatgtttggcattaagtttctagagtcctttattccattcatttaatgatcccatctatcgcatgtagccctcagaggctttggaaagtaagccctgtatgcacaagccagtccactcagaaccacttaactattgggacagtggcaaatctcccactaagtagctgtgaacccagaaaaatcaagtgtgtttgtgggtccctaagaccacctgcagattgaccagtgtgttagaagagttgacaaccctcagcaaagctctaatgtctgttctcattgtcactgaatctgaaaggtccagactgaaattggacacagagagaatgagccccccccccactactgccgcttcattaaagcagccccatagacgcccccttctgcattagatgactattggctccttacaacctatttgtcccctcttctgtggtgtttgttcttctgtggaggggttgtgtcccacatgtattagcttggttgtggcgccccactcatagctattgtccaagatttgaccagggtggtttttggtgatggctttcaggttgcaaagagaaggttctttgatgaggggtgggagctagagttgtttgtcagtataagagtgagcatctagaatgcagcgcggactcccactggtctggtggtggtagcaggttctcctctaagatgggcactctcactgctacccctgagtagctagctgggtttatagtacaaggcatgatccacctcatgctgaagggcccttaagcccaattaaacagctcttggtcaccaccacagtccaagcaccaccgttgcaccatacagatatcttgccatgctggccattgccgtggttcacaagtgtcacagctgggtaggatcattgattgcttctgccctttggcagcattttaataccttctggttctgtgagagctagtcctcagacaggaggctttcagatcagatccagcccaaatctttcaagtactcagatacatgacagctcttgagacatattgtcaaccagtgaacgtcacctaagcctcagcctctaaagtctttgtagaatatcatgtagagagacaatgctgaccacccatgcctgaccagtcttcagccctaccagagatcaaggtgatttattataataaaggacattttcatcacagactctggctgtctggcaaggtctaaggtccccaccacaggccacatttttaacattgcctgctgcctccatgtataaaccacagtaaagttaagatggaccaataatgcctagctttaaaataatactgcacggattgcaatttaaattaagcagcacagacgttcagtaagctgggaagaccattccaactcaacaatggtttcggaaacagcagaatctaaagaagggacacatttttgtatatttcttctatcaggtaatggttctttttatctttgtattcagcttgaaaggacaaatggtgtttgttacgccatactcctacccgcttctgtcccttctatcctgcttagaaacccacccaaatctaaggaaaatgagtgcctctctggagattgaggaaattagttcaggctaattgctgctacagaagtagagcttagcagctgtcaaataagaggaagggggaggcgacgcacttgtattgcaacaacaagaatccaggttcaacttaaggacaatttgctaacgaagaacgtgaaagcccaaaacagctaccaagatttataaactctccttgcctgggggggggggagagagagagagagagagagagacggctgcaaagttcattcctcagtctggatggcgcaagcttagccttggtctttgaaaggtcctgtttctctttttatctctagttcagaagcgagacaaggtctactgtgaactccacagctctgcagtggactcgagacctgaggaaatggagtgtttgtatgcggctttgcattccaggttaggcttcggtgcaagctgaattacctttggaaggagctgggtgggtgggggggggtcagtatttgggatgagacttattggaacacagagttatgcgttgagttacaaattccagctcgccatagaagacagcctttgcccacaggagaaggaaatgaaagccaaagctgatgtgcctccagaggaggatttctagttggacagaaaagcagtgaaccctgagagctgggagctggatgaagccccagctaagaggggacacatttctctgacgtgtcattgggtcaggtcagcttctgacaagctagagaaggtcagttttgcttcattcaagttgtgtgtgttctcagaaccttagagatgagacccccaagacctaacaaaagctgtgtcaggacacagtcttgaggaacagaagaatgtaactggcaagtaacagacacacaaggggtccaaggagaagcatctgctcaggcccttcttgtcctctctgagaccatgacacatttctcaagtctctctctccctccccctctctctctctctctctctctctctctttctctctctctctctctctctctctctctctctctctctctctctcacacacacacacacacacacacatatctttaggtgctgagcataatttgagggccttgtgtcttctgagcaagcactctaccattgagatacatccctggtctcaccagaaagttgctttctgtgagctggcatgtagaaaggtgggacacatcactctctgtttccaagcactatgacatcttcagagaggagtttgcatctctgtggctagcctcagggggttaaaaaggaccagagggtcctgcttctgagcccctttccttcaaatactcaaggttggtttccagagggccactgatctgctccccccctcttcctcccctcagtttgggtcactgcattcacaggaatggtgtagaaagctaacgggaggaaatcacggctcttgcataaacaggatgacgtgttttaaaaataatcatgcaaagtaagctgtgatgtccattcacagtctgtgtaattctaaaaaggctcattaatttaatcgaagggctcatttattaccaacacaaaagaatggcagaatcctgccaaggaagaaatgcttttagtctaagcaaaattagcattgaattttgctaagtaaagaagttcaagacataaaagcagatcattaagggtccccgggagctgaacataacggcacaagcctatggttccagcgtttgggaggtggaaacaggagggtcaaagttcaaggtccctgctggctagggaactttgtgctcacaaccaaagtaattctgaaattgggtaaggcatgctactcccaaccccctggtgcccaagcaaactgaggagacgccagtcattccctgatgccctccaacccactttctcttctagaagggtcactttcttttattactattgatttacgtcttggtatctttatgacagatttgatccccggaccttaaaaaacacttggcattatacaatgttaccaggcaatttaagttggatgctagtgaggtatggacagtaactggtagccattgcccagggcctaccaaaagctattctgcctgttggaggacaagcaaacatccagttcatggatccttcctcctctgaaggcaaagtccctctctagggcagcctcttcctaagtctgtctctaagatcagaagtcatctgcatcatgccccacccttggggacactccaatctacaagtagaagtcaatgcttggtaaaggaaggagagaatgtcacagtgcctttcagagttgaacataccatgtatgtaagagagaaatgatctctctctctctctctctctctctctctctctctctctctctctctctcacacacacacacacacacacacacacacacacacacacacacactgttaagattttagagcaagaaagggacagtgtgcagggcttccttgaggtccagtaaagaaaggctatgacctctcagtaaagcatggctatcctatagatgtacttatatattcattatgtatttacttttgatcttttctgctgcatgacttttgttcaatgaactggttcttagttggatctctggccctgggtggtgacatggatttctggcaaacaacaaaaaatgccatattgtctccttcctaaagacttaatccttgggcttgtcaatcacctggacaatgaactgcccctagggaaagatgtctgttctagagactctagagcagtagttctcagcctgtgggtcacatcccctttgggggtcgaattatcagatatttacattgtgatttataacagtagcaaagttacagttatgaattagcaacaaaataattttatggttgggggtcaccacaacatgaaggactgtgttagcgggtcacagcattgggaagaaccactgatctaggctataatgtaaagcctacttcaacatataggttggcacagtggtctctctggccattgcactgaaacgatagattttagatgaatggtagcaaggagattgagccttgcacccatcgccacctccctcttctcttgaacacaagtccttctggctgtccttgcccacgctgttggcagacaccgcccagcccaaggaacctgcctcacttcccaccattagaaacatctcttctgcggcctgggtgccacctgagatgcagcacagccactgtggcaccagcagtgcagccacatgggtcgtgcaatcagagctgatctggaagtccaccatcttagcagacatggctggcaccatggcctggtggtggcagtcctcacctcctactacctgacagacagcatcaccctctggagatgaatgggcctggcctaccagatgcaccaggaaagttgcccagtctttctcttctctcccaggggttttcctctactggacactgatctgtgggtgatgctgagaagcctggaggccagctttgtcaccggcactctgtggtcctgcccagcaagcagccctggctgttcatgagcctggtcatgatcctcatcttcagaggtgcccgctccacagtctccccatccccatcttctccacagtctcaccatccccatcttctccaagtctccccatcccccatcttctccacagtctcaccatccccatcttctccacagtctcaccacccccatcttctccacagtctcaccacccccatcttctccacagtctcaccatcccccatcttctccacagtctcacatccccatcttctccacagtctcaccatcccccatcttctccacagtctcaccgtccccatcttctccacagtctcaccgtccccatcttctccacagtctcacatgcccatcttctccacagtctcacatccccatcttctccacagtctcacatccccatcttctccacagtctcaccatcccccatcttcttcacagtctcaccatccccatcttctccacagtctcaccgtccccatcttctcctcagtctcacatccccatcttctcctcagtctcacatccccatcttctccacagtctccccatctcccatcttctccacagtctcaccatccccatcttctccacggtctcaccatcaccccatcttctccaagtctcatcatccccatcttctccacggtctccctttcctaggatcaccagccacaggacgctacacaaggacccaccctccacagtcctcattccagaatgaatagcctgacagacatgcacaggcagctgccccttcctccatagctggtcaaataaatgtacagtgccctagtgcccattgcctgttgcccagactaagcctggtcccacactgaggaaatgtggacccactcttctgccatccaggcccctgagcagtgaggatgccagtgttcaggtgccccatattcaccctagagttctgtatgtgtacaaaggagttagagttgccatttttctcttcattgatgtttgtaaaacattttacctgtccagggttctttggaagagcccagactcccaactacataacaaccattagtacagtgttgctttgtggggttctggttgctccacagatccgtcctgacctccatcctgggcagccaggctagagggcagagtgttgctctttgccagtcctgacctttgaatccagtgaagttcttaatttgggcatggcgagttgagaatttttgtactatgcgctacataaaatagcttattttggccattgtgctttctagatttaggtgcaaaagtctggaatacaccacggtctgttctctatcatttccctaaagtgtcagttatgcatgaagtcaggcatagcttctctctcttctccaactgcagcaatcagtttgcattgttctcttaaatttttctgaatttactttaatttccatgcccagatgaccagcccctcaaaggtattttattaatattccttgaaaatccctctagtgatttttctgggctccaaataaaattcaatatgtggttcgtagctgattgggcagttctagatatttctgtgtttctggcctggaacatactgccttttacagatttgttacctggaaaaaacttttaaattgtaaaagtgatcactcagaaaaaaaatcaaaaagactcaaaatgtcgttgcaagtttctgttagaaactgtggccttcccaaagaaaacagacggctcatgggggtttctatctctggtggagaggtgaagcatgctctcaactgtctattttctagccatgtggcctgctcggccctggaatccgtgtcacttctaccacctcatcagcatgtatgaatatgcattgtttgttagccaccacattaaacaagtttactccaaacaatgttgacaataactaaggctcacaggttgatctggacactgaaagtcttgaacagccagatggtcacctcatctgcaggccaagagaaaagggaggtagactttgatttccatgtgtcctttcatccgagaggcctgagagtcagtagagggctttacagaagatgtcaatgcaaagagagggagggagtataaaaaacaaaacaaaatcgtggctgttcttgctgctgatggaatctgagtcaggtttgctattctaaacagttaaaataacccaaataaaaatgaaagcctcatatttggcctttaagacatgttaacaaatgtccaattacttaggagactttataatatgaaccaaacagacacagtcccaaactttgggtagtttgtccagcaaagaccgtttattatgttgagaacggattcactgtgtctcctcttgccaggaactacaagctgaggacacaggggtgaagaaggcaacaggattggaatcacagagcttatgttctaaggagggagacacagtgaagccaaacaaactgcacagagactaagtaaccagtgacgagatggttggagtacagagcggtagggagaggtgttggggttagagctgaatgtaaggagttagaaatcgagtgtgagcgtgcagatgcctggagtctgcagaggatgacagggaattttcaatcttgattgaaaacttggctggattgaaacgcgcctgggggttagggagcaaagctttgggtatatctgtagggaagatgccaggggtgtctagacaagattatggtctcattgcaatttcacattagggattatagccttcaaatagaaaatagcttgtgaaacaggacttccatcctattgtataaataaagtcccaccgtgaatccatgaatacggggcagcaacatctcatacactgagacctggatgatggactacaagagcaaagagtatggagcccactcatgctgacacacccccccctctctctccctctccctctctccctctgtctgtccctccttccttccccctctccttttcttcctaaccgccactgttcttcatgataccttccccagcatagttgcctggaaccggcagccaagagccccctccccatgctgttgccctgctgtgatgcagatggggaggcactggtttgtttggttcatcaacatgccaccattaagaacactgcttctagagggcaggcatgaggcacagtgcatgaggggctcggaggtgttgccaaggagccaggtcggggctggccttgctccctaccctggcgctgtcacagaggaagtgggaggaggacctgtttgaagagcatgatgtcatctgaccacactctaatggctctctggaatagtaatgtctagtgggacaaagtgccctttccatgaaatatatcacctgagacttttcaaaagacatttcccttctctcctactttagccctcgctttcctctcttgtttcctctacccagctacaatgcagagtcacagggtcaggaactaagcagagctccactgaagccagccagtcctggcggtccccagtggggacaattgctaaagcaactaagccagtggagcataaaccagaccaacaggtgctctgggtgttcattcttaagatccatatagttccaagttcaacctttttacaaaaccctccatcattggcaattgccagatgagtgtttccatttcctattgcttttagatacccctagctgaggctagaaagccacaaataattcactactaggccttgggctatgagctccaatagacaagggagggacactgctgtgactgagtgggaggcagtgctttgagcatctctgcccctctgagacaggaactttagttgcttgaaccagatgcctcctaggtgggtggaattcttctagaacattaatggcagatatcaaattgtaggtgatggggttaaatacagctttcgactatgtagaaaatgtaacattctgaaatatgtgcaaactaggagacagagtgccatggacagggatgagattgatgtacatgttttagcacatttgccactgttggagcatagacagaagtgcggctaatgatggcactgagcatgctggggaatttacagaatttccttccattctgtcccttgctgctctttccttctcacagtccagtgaggggctttctttgaagtttccttgccggtcaaaggaatcttcctccaacagaagacattgtcctggtgtcccttcctagcatctcattatctagaaaagattgtcaattaatggttgctagaacagggaggcattgtcttcagtggtatagccactagtaacttcccgtgttcctgtaaattacccctctctatgctcctgtaagcaagcctaattaaacacacacacacacacacacacacacacacacacacacacacacacacacagtcacactcatacacaatcacacactcacacacacacattctctctttctctctctctctctctctctctctctctctctctctctctctcacacacacacacacacacacacacacacacacacacacactgaatgatggttttgctcttactcttttggctcttcagtcttttggctttttgagagtctttttgggggacctccacccagctcccagataaatcacagggagtcttattggcttgtttctgccaagcttttctttaaattatcctgtctaccttttccctctgtgcttgtatctttcttacttttctatatcttgctttctctcttactccatggctgactggtggctggtccctgatttcctcctctccttgttctctcgttcctctcccttcctcagtttatccttctatttctcctctctgcctgccagccctgcctatcctactcctgcctcactactggccattcagctctttattaggactgccaggtattttcaacaggcacagtaatacagcttcacagagttaaacaaatacagcataaacaaaagaataatattccccaacacacacacacacacacacacacacacacacacacacacacacacacacactgaaaggagaagggaattggctggaaagagggaaggatcagtggatggggaggaggatgagggagggaaatgaggggtcgatatgaccaaaatacattctgtgtgtatctggaaatgttatgaatcacagtactgcatataactaatatgcaagaaactttttgtgaaaagattagctcataggaaaagaacaccaagagtttaacagcatgcaacacattttcttctaagggttgccacttgaaaggactttatttacataacaagacagtcttgactcatcaagtacaccctacttcctctgttagaactcccaatagactgttgctcctcacccccaaattccctaacttctccagttctgaatgctgttcagacttcaactgtgcaaaccacttattcatgtaaatagctttattgcttgtcttctattgatccgtgctacttcatttaatcagacagaattataaagccaacctggtgtggagggtgatttccttcacacacacacacacacacacacacacaccacgcacacaagcatctttaacctcctaattcgaggtaaggttctaagaactagtttatacctgtttctgcttgaattggatcccaaaaccatcaaagcaaaatttttcatccaaatctacagactctgtgctcataaaatgcatctacaacccaagtctatgctttacctctcgaaggcatgtgttcactgatgtgaatgtgagtttcaaaaatcacaagttagtggctactttgtggatggaatggaatactatttgcaaaagaaagatgagctacttgattcaggaaataaaagaaattgtaactatatctaagcaaaagaaagaatgaaaaggtattgaagtgtataattaatttcatcttatatcacaagaagtgaaaaatttaagattacaaagaaaacatgattagagattgcaggggatgaggaacccatgggaggggaacttttagattagtgggactcttgtgtgtggtaatggtttggttttgctcgtttttccgagaccaggtttctctgtgtggccttgggctgttctggaactcactctgtagaccagactggtcgaaaactcaaagatccacctgcctctgcctccccattgttgggatgaaagggttgtaccaccactgccaggcaggtactgatttgaaggacacactatggagttgtcaagacccacaaggctagattatgaaaagagaagacctttgtttctttttaagtcaagatgttgggaatatcaggatggaatgaagacaatattaaattaacaatattaattaacgatattaaaagcatgtggctgaatgacggaagaggaaaagaaggcaaactaagcaactctggaggaagtgtactagaccaggcagtgtaattgctaaaatgtgcagaggagctgcctgcttctgctgtcatgctctcccccagaaatgatagctgtagcccttcaaaccatggtgcaaacaaacccttcctcctcaagttactcctgtccattatttattcacaacaatgacaaaagtagcaaacatgggtaattttagggctgaagaaggcagtcatatattacatgtaaaaaaagaaagaggcaaaaggaagaaaaacatgtccagtgctcatttggcaccagcgatccgaggtgacttagttcagtcttcttccatgcagaatggggcacagccatgttcatggggagcagcagcttgcagatgctggcaagattcctgagtatccaacacagttcacctgagaggaaaacacaatgtttcttcagtcgtcaagcagcagaaagggagcacattaaccccgcatcctttcggtaatttgggaagtaaatctgagttacactgtccaatgcatgtggggctttgtcatggcaaatacataggtcagtgccgcctggcatttatccactgccattttctcttcccacattttattattatggtatctatgaaaagatcccctgcaccacaaggaaagagtgaaaaatggccaccaaacagcattttttgtagcataaatacgtggtgtagaaataaatgtgtaaccatctatacattcattattgcaatgaatatgtggaagaagtttcagaccagaagggcacaattccagccatccccctctccgggccccatttgtcatagagaaattctcttcctaggggactgtatcacaaagcttggtgacttttaaaggatagacagatgctgtggtgcagccccaagcttcctccacttgttctctttgtgaattgagttggattatgtcatttcctcccatgacccataatgaagcctgaagagtaatgaccctgagatgtggcatagctgaaatggcttctgcagtgccagaaaaagatgattcacacttggcgtaggagctgtttctagaaactgccagagcaaagggcagaggtaactcaccaagaagctctgtcatcttgcaaccctctttggaggcagtggcatgctgctgaatataaacacattagctgccattttcataaacaagtgtgtatgctgtgtagaactctgttatgtatatagacatttaaatatgtatatgatcgttcatacatagtttatccatttgttcttagggtacggatgtgtctgtttggatttgatagttcttctttgttccttcattttaagatttggtctgaaagtgattgatcagctcctacagtatcaccagtgtaaaaataggcacttggttgaaattgtaatcctgctatcattcgttcccctgctcaaggaattaaaagaattacattaaaaatatgtggtggtcttgtgcactttttctgacctgccagcaaaattcaggaagcatctgtccacctgagtcactggtgcttctgggacagggttttccaccacttctcggggatactgtgtccccagataccttgttagggaatttgtctccacatgcctggtgggtgtcttttcctcagcatctgatacatcaatggaccacccagttatcatattcctcccgggctatgtgtcaagctgcacatttatttttcttaatcttttctcaaaaatcaattctccaagtcccttaatcatttttattgatcacccttgaattttctccaggatgatggcacctgtctgctcctgaaatacaggtgctgtctgcctcacttactgtcaccatccttgctcaagttcagctgggatccacaaatattcagcatggtgcataccagccgacttctgcctcaaaaagcatctgtttcctgcattttgtgagacccagcctaacaacttgcatcttgactatttgggcgtcttatgctaacacatagacacaggatcaacattgttaagtctgggttcacttccctgtgcatctagaaatgtccaagactgcacgcctgctttcctttctggatcctacctctccactcttcactgagcaccccgtgtgtcaggggagcatcaggagacgatgtcaggaggaagacgaaatgcagattgcattccacttcaaaacctcttacgttgcaaatatggcaagcttgttgcacatgcaaatacttacccgacaaatgacagaccatttgggacaaaaacacaggattcttaataggtgtgggcaagagaacattattctgtgggagaaacagtgttgactgtaggctgtgtctgatgataactgctccctttgtgtgagtaccagctgagttagtctgaaggttgttactcaagggtaaaagggctagccatagaaacacaccctgaccctggaaccagagccagcgaaagaaacacaccctgaccctggaaccagagccagcgaaagaaacacaccctgaccctggaaccagagccagtgaaagaaacacacattgaacctggaactagagccagtgaaagaaagacaccaaacctggaacctgaaccaaacaaaaaccacctgaccctgaaatcagagccaaagaaacacactttgtccctggaaccagagccagtgaaagaaacacaccctggcccagaaattggagccaaagtgttaaaaggggccagtgaaagaaacacactttagccctgaaccagagccaaatctgcccctgaccaactgagccacaaaaccaatcaatctctgtgcatgaaaccaaccaatcccagagcacaaaatctaaccaatctccgagcttgtcaagctcagagaatttaaatctgacccgttcccaccctggtgattttctccctggaaaaaatgccaccgctaaaaagctttatataagctttgtgtctgttggcagctgcccttctccaccctggcagaggcagccactctcctgggttcctccttcccaaataaatctcttgaaggagtttggggtgaaaatcttttcgccagagctagagcagaatccctgctgggaaacccccttaggggaacagagcagaagtaacaacttttttgactaggcatttccccctcagcagagtgaagcacagaagtaacaacttgggccagagctggctgagaagaaatggacatctctcttgggagactcttctggggcagccaaatggagcagagctcagctgtaaaccctctcttgaagaggagccagtttaaccatcacccaccagaacccagtttcaggtacagcctgaatacctttctcatcacaactgttagtccagttttctatgcaggcagaggttggctttgaactcctagtcctcctgcctctgcctcccaagagctaggaccccaggaaagtaccatcatacctggaagagtcacttttatgcaaaagaagaatcatcagtttatttcagatcctgcaagttttccttgggaacagctcactcacatacttccactggctttcaccttcatttgttcaggcaaaacaactccagaggcagaagaggccgtcaaactgggagaggtaatcaaagagaaggcagctgaacttaggctcttattcagcaagagcctctgtctcctctttgagataggccagctcagctaagctaaaatcaaatccatatgcatcaaatttccatgttaaaatggaaagtggtattccaagaggttccaacctagtctccaacggacataagaagcattcctaaaacatgaacccaataatgagtggcagcctctggtcaggtctccacaatggagccaaggaactgaagacaccattcctggctctcctttccagagtttcaaggcctgcaagagtgaattgtttagtctatgacatactgcctgttactaagtgattctggttgtgttgataaatttgttcacagctctaattgtgttaatgaattgaacataattaaacttacaacatgtcatgagtttcttctggcacaacccagtagatttttcaaaaaaaaaaaaaaagaaagaaagaaagaaaaagaaggaaagaaagaaagaaagaaaggaagaaagaaagaaagaaagaaagaaagaaagaaagaaagaaagaaagaaagaaatggaaaacaaacgtgccacatagcttgaataccacaatatgatctctggagaagagggtgaaatgaaactttctggaattggctttgtgaagactattcctttgtgactaaaattggactccattagcaataactacagcctcctctggttacgttttctaggccgtaagttcccttagggtagaaagatgtgtggtggtagttagttttgatggtcaacttgatgagattttgagtaacaatggaaacagatctccgagcagctctgtgagggagtctctagactgatgtaattaagataggaagactcaccctgaatgtgagtgactccatgggctagggtcccagcctaaataaaaaggagaaagcaagctaagcaaaagcatttatgtgctctgtctcctaactgtgggtgtgatgtgaccagctgccttaagctcctgctgacagaacttcctcatcacaatgggtgagccaaaataaaccctttctcccttgagttgccttaatcatgtgtcttttttcccacatcagtgagaaaagtaactaagataatatgtattattgtacctttgcccttattcagtagagatctacacataaaaatgtattctagttttttgtctgttactgcaataaacatcataacaaaaagcaactagaggaagaaaaagtttgttttagtgtatacttccaggttacaagtcatcaccaggggaggtaagggcaggaactcaagacaggaacatggaagtaggaagaagattgtgtactgactcactcatatgttcagctaggttttgtagacagcccaggccaacctgcctaggcacagtgtgatgggggatgtatttatgtttctcttatgggttgatgagtaaaacactctttggccagtaaccaggcagaaagcatagacatggctaccagaccaggagaaggctggggagaggaaggcagacaggaaacaccatgtagccaaggaaggagtaacaggtccagacccttctccggtaagataagaccatatgcaaatacttagattaatagatatgagctaataattaagagaaatctagcgcgtaagaagccctagccaccagccaacagttttatgattattatgtctctatgtgcttatttggggttgaagggcaggacagaaacctccatcttcaacagtgctacccatggtggggtctagaccccctcacaccattcatccatcaaaacagtctgtcacaggcattgcaacaggccaatctgatgaggcaatcttcaactgaggttccctcttactgggtgtctctatgttgtatcaaactgacaataagcaccaatcaaccaaatgtcaaggagtggatttgattaagggaaaaattcactggtaatctgcccactgggaacttatagaagggggaatctataatggctatagtcatcacccatgtatgtggaccctaggaattgaagcttttccataaaggactgaattcaaccctcacaaaagtgccggtgaagcagttattgccatttgacaagaggacactaaaattccaagaggttacaccactgatcttaaacaccaaacttaaatatggagcttgagattcaaactgaagcctgactgttttccctactgccttttacatagctcccggctactcaaaggaaacattcaagatgatagctttccctttgggttctttgttgcaaaaaaaaaaaaaaaagttattgtgagattgccaagaagcaaataccttgcttaaaaacaaaaacaaagcaaggaacccctgtgtaaggttactaaaggtatgctattctcatggtgtctgcaagggtgtaaacagtgacttaactttacccatccatctgctgcaatgaaagacactaagcactcattggttgcttattgctgacgatgcttcatttgaattattggctgtcaataacttgaaatacctaaaatcttagttttgataaagaaaataatgaaatcagtacctataaattactggtgagttatgggcataagaagagcaagagcatgcacaccagaaaccaggaagtttgcatatgtttacttcagctttgctagaacattccccaacaattttatagcattactagcattttgctattttcgcatgaatgaaaatctgaagacctagagatgagaagaaaaatgaagcaaaggcctcatgatgttgcaaaatctcattttatttatagtttgtgagcttccccgagatgctgtgcctaatccagccgaatgagagcagcaatggcgctgagagtctccccataagtgaaggaggaatccagtatcacattaacaagttcttcccaccatagactcactctggaagccctgcaccccctgcaggaaggagagaaatttacctggacactgcagattccagggcaaaaacagattggatcccactcatggcctctgagcactcaaaaaggctggaagaaagagaacagatcatttgtgattgaggagctgtgggataagtagctcagggtgacaaaggagcccaagagaaagtaggtaccacacaggtaatcaatggcctgatgaagtccaaatggacactgctaaacaaagacctccattgttgtagtaaacacacagcaaaaatgatacctctgtcatttactgatttgtttatttatttattgagactggcttccacactatagcccaggttggcttcatacccaataatcctctattctcagcctcctgtgtgctgggattacaggtttacagcaccatgccaagccaaatgagactcattaatcatttttgaggttttagctttaattgatttttcaagtgtaaccttttaaataaggtatatcactagtcaaagattctatatttgtgaatgtgcctgctcacccaaatttaccgggaagctgcagatcatgactgtattttcttggtcccttgaggacatacacagaatgggataaaccacagcactcaacaagcatgtgtccaactgaggccaaatgaagggttaccctgctttgttctgtcagtcctcatggaccccatccagtggtctttttgcactctgttaagtgagggtcttttcacatttatgtggttttgttggtggcatcactgttcagtgctgttacgttagaacactatatactgcttctaagctcaagaagacagacatgggtcttacacacaaagcagcgagttagatcatctttgttcagacatttggtacagtgctgttagttatgacctccatttcaatgaagcaaactctgtatatttttgtaagttactatatacaaggagtatatagcagatatcgctattagaaatgattatgaattaatcagtttatgattatggtatgaccagaaggtcctgggaacctaactctgcatttctcttgaggttaaaggtctggtatttgctcagcatttaaacagcttcagagaatgcatccagtatatattaaaggttggtccaaagacagagtggctgaagacttttgactccaccataatttttcatagaatagaccttacatagattaagtgtttattgtatctatttagagataggggttcacacatgccatcgcacatgtgtggaggtcagagcacaactggtaggagtcagttccttccatcatgtgtctcctgctgatcaaaattggaacatcaccaggcttggctacaagcaccgttatcactgagccatcttgttgaccccttaatagatggcttgcatggatgaataagtgatggttctgaagaatttatactctgtggcctgataagaagattagctagaacttatgataaatcaagcatgtgggagtgagcattgagagaagtgaccaaggaggaaaggcaggagattacaggacctgtttgggatcaaaagatgctctaagcttatgcagcattggatttttctcatctgatgtggtggtttgaatatgaataagaatggcccctacaggctcctatgtttgaacgcttagtcatcagtgagtggtattacttgccagggcttgggaggcgtggccttgttaaaggaagtgtgtccctggggggggggggggggctttgaggtttccaaaagccaattccaagctccttctctcctctttccctctctctcttccctcctccctccctccctccctccctccctccctctctctctctctctctctctctctctctctctctctctctctctctctctctgctgccttgaagacctagatgtagaactctcaactccttctccagcaccatgtcttcctgcatgctgccatgtcccacagactaaacctctgaaactcaaaggaaactgtaagccagtcccagttaaatgcttctctttatcagagttgttttagtcagggtgtcaggcttggttaggctgtcgcttcgcagcaatagaacactgattaagacatttgaattctgaagaattgctctagtgtatgttggtggttgcaagagtgagaaatcagaataaatattctcttcttggtgtcaatcaagtttcattctgagaccttgagctgtgtttaacgaaggtatattcctaagcagcctcaatccaaagtcaccttccttgcacatgtgcaaatcttagaactgaacaaagttaacatttgcctcaggactcactcaggtccccaccatagtcaggggtcaggtgaacagaaagctggacctggaggtggggtgggaaggagtagaggcaacagcagggagatcgggaggccaggaaatgcctgccaacctctcatcccaggaaatactactcaacccatctgttcataattactagttttcttaccttaaaaatgaacacagagacagctaggtggctcagcaggtgaaggcacccgcctccaagccagacaacctaagtttgattcctggccccacatggtagaaggagagaactgactccaaatgttatccttgacctccacacaccatatgatggcacacgcatgcatacacacacacacacacacacacacacacacacacacacacacacacacacacagtgtactaagggatctcaataaatacgtaataattctgtaaagtacactagggaataatattagtgaaatgagcattctctatttgtatagacaaagtgaatcccattagcatctgtcagtgagcaacaatttagaagcctaaatgggatggatggatcattcagtgatacaggtcaattctaaatcatacaaataatggcttaaggaagtatttttggtgcccagtctggcaacagcagtatcctggttgaggtcgtggattactaactcccagagtcctgcttcaaaactgggaaagattctgagctcctagcctttagccttggcagcttgcctctgagatgccttcccttatagaagaattccacataggtttgtttgtgtcaaagacagataatgcagtatgatttctatttagaagacacatccagcaaaaggcagaagtcttcagtgaactcagtcttcaaaagcatgagtctggcctctgccttgcctgcctgcacgttaacacatttctgtacaatatttttatgtgggaggtagaggtaaaccattggtttccaatacagaggcatgctaagaaacatgggggtggaaacatgtatgttctcacagatgtaggaaagaaaagtatgaagtttatttagggactagaaaatgttcatagataatgacaccgatgacattttcctgactttttctagctaaactcagggagggaaatagaaccagccctcaaagcagagccaggaagacaccagtgagttgtctcttgttgaaaaactgctagtccacctcagccatgatgctgtggagacaaggaggcaatatccatgaatgtactctcagtgagctaatgtgatcatggggactgtgtctctgttctgtaattcttcctctgctgtcctagagatgcccagagagaattgggatgctcatgatatcatggaaaattgtgctgccccttcccccattacacacacacacacacacacacacacacacacacacacacacacacacacggcaatagtagatagctgtgacagagagtgctgccaggtggccagcagctcccaaatgcgtccactttgtggacattagttcacttgtgtctactccaagggaagtttctctgtgagtgagagttgagctgtcaccttcgctcagatattctgtgatgctctgtcatgtccgtcacacatatggtgcctggcagggtgcgcctccactccaaagccctttctggagagcatctgctaaccctgccagcctgatgcctccaacctcagcaccaccttttcccaggtttcttgctgaatcaaccaattagctcaaatcatctctgactgctttgaactatgtcttgttaaaacatgggtggacagggccctgggaaagtccaaaagtcactctaggaacaaagcctctggatccgccagaggctggcatctatctcctctgttccgaatttaatagttagtggtattagggcttaagccttcaacatggattctggaagaatcctggtggagagtctgaggagtggcttcactgccactttcctagggacatttttctcaggatctttccacaatctaaaccctaaaccataatgattaattttgggagggagtgaataacagctctctgccaagggatcaatgatatatcctataggagattatctttcctttaacagctgcacctcagcttatcctgtctctgcgacagttcccttcccttccctgagttcccagagtcacatgatcagagggaagttcacagctctgtgtcctgtggccggcccggctggtcacactgaacaggctctgtgcactttcccatgccaggaggttgagggacaaagattcagttagtgtccatttatgcctaacagtggagtctgtttccatggaagcacttttgccctggatccaaatacataccttcattcctaaattatgcctaggacacgtgaatgctcacaaggaatgcagtcgtaagggggggggggcagaaaaccacactaagacacacacaaggctggccagctggccctttagaggttatttatttgttgtaagtgaaatagttccattaagagactgtgtgtcatggggaaaggcctaggcctggcccaggatgatgtggtagactttggggagccccttttgagggccttaccctgcctggggagtggaggggggatggctaagggtaggtgggatgttggggggaggggagggagagagagaagggattgacatctgaagcaagcttgttcctaatttgaactaataaaataaaataaaataaaaagagactgtgtgccgccacttctgtgttcaccgttcaaactaagagccagactagtgccttacccacagcgtgcatcaaacaccccacccctgtcactttctcaggaaaatgcctgaaacttttaccaggtgaaaactttgaaacccacaaagcgagccaccagttcgaaagtgacgtccacccttttgattcgagaactgtgctgatattacggtggacgccatgacgcagacaaagaagagatgcaggaattagtggggtttttctctctcctgaaactacttctccccactaagtagattattttaggtttcccatttagtgtaattagtgcatatggtccagctgagaagaaatagctgcggagactcctaacttattattaattaggctcattaaaatgcaagtaagagagcgtcgtctaggtaaacaatcccttatgtcagaaaggccttacttgacaagagtgaaatcttcctaactaaagtcattactggaacttggtggaggtgctctttaaggctccatgggtgccagttaactacttttgagtgacatcaaggacagacacgcagagctgaaaggagccagtggtacggcacagcaattctttacacatcatttcaaaatatgtctgggggaggttaaaggttgacagctcactgacaggccttcttcacccgccgcggtgtcacagcaggcgcacgtcagggaaatttcccccagtttcttacatgttcacatttcttttcctgtcttgcaagtttggagggactgacagcactgtgacaaacacctgggaaagacaaatgcgcattatccctggtggaggagtgggaagtctgtcctgatacctggccagataggaggggagaggaggtttgactggatccagagggatgtcaagtaccggccccaccagccataactgtgcacttggccaagatgcgtgcaggtgagctgtggtctgcagccactggaaacacatctctatgggctgggagctcacaagggagagaccatgggctgcacaagaacgatgtacagaatcaacttggcccgtctattggtgggagaacatagagtttcagggtcagagcctgcatggaatgtcaggcacagccttgtctctggagtcctctgttaggcagctgcagaagcggcaggcacacacaggcgagctgactctgagagttctagatatgcttccctgcctttaagagtctgtgcacgcttacacacgaaccacagcggggatgtgggctccagtctaaatggatcaaaagaggccattgacaggtggtgaaatgagtgtctgcctttaacagtgggtcaattgataagtgtctgacctggacttttgactgacatgaagagctgtcaggaagtaatcttctttcctagtgatgacaatggcactgggaagataagaaagaggaaagagagacccggggtggctctcactccctggagagcacaattgttgcccccttggaccaacccaggcaacgtcatctttcataatgatagcccacacctatgctggatgaagaacagggtattcgagtgaagtctagaagtccaggaatgggacttagaaaaaagctgcaatttgttttaaccaatacactgttactgataccattttaatgctatcccaaaaggattataggaaaaatgttacatgtaaggctgttgtgttgttgttttgaaacagggccacatcatatattatgaaaccctaactggcctggaactcagtatatagagcaagctagcattaaattcacagagatattcctgcttctgtctccactcaagtacttggatttaaggcatgagccaccatgtccagcacagccaatttagttcggttttcttgtgtacgtgtgtgcttgtatatatgcacatatcactgtgtgtccacgttcatatgaaagccagaggttgatgtgtcttccagttgggagtcttccttgggctgccctatgccttgtgtattaagactaagtctcacttgaacccagaacttgataatttgactggtctcctggcaagcttgttccagacaccacctacctctccttcctgagcactgggatgccagcagggccatcaggcccagccagcacttacatgggcacccaagctcccaagtcagttcctcacagtggcatagccagtactttatacaccgagtcatttccacagcctgagtttgcagtcctggatagaaacatgcactagagtggtaccaggatctctgtgtatcagcctctgttattcctgactaatttaattgacttatttgtttacttggttgtagcggggattgaacccagagcctcctgcatgctggacaggcataggtctgcagccctggcactttttattttgtgcaagggtcttggcaaggtgcaccggcttggtttgagcttactctgggcccaggatggttttgaactccttatatgtttgcctcatcccactaggggactggagttataagcctataccaggtcaaccttgctattccccttttagcaaatttaacatttgaacatgtgacctctgtggcagggtatatcctattttgcaatatcatttattccacatgccaatccaactaatgtctggaacactccttcttttgagttctttctccacatgtcaaaagctgtaattttacatttcaggtgttcaagtctgagttgaaatggcatagcctgacaaccagcagaagtcagtcgttgagtagatgtgttaaccaagtccaaggctatccagacacctctgcatggacaggtgctgtactaatgagctttccccctgcctgtcaacctcccccacactttctcaaggttggtgttgccaccactctttatagctaaagaaactgagatcaaggaactggccctagggtgccagtgtgctcacttttttaaaataacggaaacactgaataaaaatgcaaggccaatgttaccctcaagagaccactgccttgagaggaatagcccagaacaatgtggagacagacatggcagggtggcattggttgggataggctgagggggcagcatcctgttcctacacgaataggttttcagctcttcattgtcccccatggtggcagggacattggtacttggggtgaagccggacggtggagtggtgattgcagacattgtgatctcctgctgctcatttccacaatgtctcttgcattatgcaagtcaacctagcaccagcctgggtacttcggaagacttctgtgatttccagtatttgaacaaattctcagctagacataactgatgaagagttgttgggagacagacaggtatagccctagagctattcatttatgatcgataagggccatgtacagcaacagctctaagatgaaccctcaatggagcggtgtggtcattagaggatatgccaatagagaaagcttcctaggttaagtggacatgcatgatgtcacttaagaagccccttcactggccactagtcatagtgcatgcatggctcagcctgaggaggagcaaccagaggccttagagcttgtaagcactccatgccagtgttgttctacggggatgctggttcctataactggttttaaatggccactctaactgaaaggggtgttgaaatggaaccattgtcagcagggaccaactgggagattgcccacatgatcagtggatttgaatgaaatacgcactccagagttgaagctgctcagaggtaggcttctgtaaaataaatcagtcctagaaagaaagaaagaaagaaagaaagaaagaaagaaagaaagaaagaaagaaagaaagaaagaaaggtctctatttcacaaaagaagaaactggttctcaaccttcctaatgcttcaacactttaatacagttcctcatgttgtgaccccctcaaccataaaattatttcagtgatacttcataactgtaattttgctgctgttatgaatatatatatatatatttcaggatctctgatatgtgacccctgtggggattgtgatccacaggttgagacccactgctgttgtgtgtcttcctcagtcacaccagtcactctctaccttatttttttaagacagtgtctctcactgtacctggagctcactggttgggctatcttccttcccagcactgagtttacagtatgtaccaccacacttggcttttgtgtgagtacgagggattgcactctagtcttgatggttgtacagcaagcatttttctaactaggccatctctacagctccaggtaattttatttgggatacttataatgttttacatgtgtggtaggttaaaaatattcaatgaagtcatgaaggaaagacagtagaggaataggctcaaaagggttctggggacagactatgtaggagctattgaattacaggaaggaaatatatctttttctgagtaagaggagagacaacacctaagtgtgaagcatttaattctttgagggctgatgtccgtctttctctgcttaggaaaagggccatcgcagaagtccgtgagttactgatactatcagggactttagaaatcctcacacactgtgtacacatttgcctcagaatagaagcaaggctcctatgttttcctcagatatgacaggcattgaattagtttaaaagcatgaaacagagagagcccacttgagaatccctcacaggactggtaactaactggaaaagaaaattgctgtatttgtaacctgaggagtcccagctgtagtcaggaaaaagctgaggaaccagcatttagcaggatgtcggagctcgtggcctgagcacttcagctttctaggacaatcctaatgcctgaagagactcagtgactgagaatggcttcggccttgatggacaccttctcctgtgtgttcataaaacatttgtgccttttttcccagagaagaaaattaccttttaaaaacctgctctaactttcttctgagctaaggtgtgtctccagtggtgtttgtaatgtttcctttctgtgtcagagcagcgagttggctctcttaacgcttccctgacctcccttccctctctaccacacactgacacctctagcccaaatttgcgcattgcatcacctcaggaaactcatggctaatttcattatttgggagaaaaaatgcaaatcaagccagacagctggtgctctcctcgaggctgagagtgatggaggggccaaggcccacctcatcagaggcctgcacacccgcccgctcagacaggccatggagggtggagagcaggaggctaccagagcagcaggaacagatggctaggaggggaaagatggacgagcccaacttgctggagaggctggggaaaggtggagtgtcagctgctgggccctcagacagtgtacaggacaggatgggcaagccgtatccttcaacaacacagtttccttcagggtggtggagccctggcagccagcttcatgacacggtctgccagcagcaacccgtgctccctcactcccattgctttattcacggtgccttcatgccaccaaaacagaaagactgtcaatagataactatgaagaggagctgggggctgacaaggacctgggctcaaccgccagaatccacataaaaacaccaagtagggtaagatgtgattgtaaacctagtgctggagaaagaaggtcagggggatctctgctgttagctggctagcccgttcagcctaattggtgagctccaggcaaagcagagaccctgttcaaaggaagtagatgcatgaggtgtcctttggcctacacacacacacacacacacacacacacacacacacacacacacacaacactcacactcacatacatacacactcacacacacataaaaccacacatgcacacactcacacacatacacccacacacacccccatacaaacacccatacatacacatattcacacacacacacacacacacacacacacacccatatacacacaagaggggcaaaaggagagccctttgcttttgcctgaaataaattttagtttgctaaaacaagttgtataagacatctaactttattttgctacaactaacttggtttaattttttaaatactgtgctggatagttttatgtcaacttgacacaactataaagtcatctgagaggagagagattcaattgagaaaactgagcttcatgagatccagctgtaaggcattttctcaattagtaatcaaagggggagggcccaggccatggtgggtggggccattcctaggctgttggtcctggattctataagaaagaaggctagcaaaccatggagagcaagcctggtggggaatgtactgtgtatgtttatcttattgattgttaaataaagttctgtttggccaatgaaacagcaagttagataggactaggagtcaaagaggattctgggaaatgtagtagagaagtggtgatctaggcaggaagtaacatagcaaggagactcatatttgagctaagagaaacaagaagtgtccctctttccccttcacctccttcaaaggcacgatgtgatccaccagcaagaagggacaccaataaggcgtccgataagataagtcttataacatatatagatttatgataattaagactgagctaacagatgagaagtcctagtcattggccaagcagcattgtacctaatatgtctctgtattattttgttcatccacgaggcgggcagaactggggcggctggtggagaccacccacatggcggtagggctcggacagcttttggcgggaagatttatcgtaacacaagccagtaagcagccctcctccatggcctctgcgtcagctcctgcctccaggttcctgccttgcttgagttcctgtcttgacttcctgtcataagccagataaaccctttcctatccaatttgctttttggtcatggtgtttcatcacagcaatagaaaccctgactgagacaagctgttgtggacgagtagtgggaaaggaacttgctggaaggctgggctcctgactgctgtagcacagtgaccctgctaaccactgtctcctctcgtttctctcgtttctcttagaacctaaacctcactccactcttttctattttcctctgctaataggtttttgctccattttctgcgtgtttgttgggttttgtttggtttgttatttgggtttttgttttgtttcttgtttgttttgttttgttttgttgtttgtttagacagagtctctctgagtaggcaggactggccagcctggaactaactttggagacgaggctggtactcacagaggtgtgcctgcctccacctctgattaaagggtgaaggtgtggcaccagcacagctggcttctgtgagtgctgggtctgcctggccttgagtatcagtgactgtctcttgaccacttgttcttccactgaacctgattcggacagtcccatctgttactttgaattttcctatttggtattgttcataaatcaaaacctcctgcccagaattcctgataattttatccctctgctcagaggcttgctgatgtcaccatttggtcatccactaagatccactcagaagctagcgttgccaccaagacactgcactgtcactccgctgccgtgtcacgttagggtttacatctattgtgaggcaagcatttacctcattttcatgtgggggcctcagctaaaacaaggaggaaaaacaagcaaacaaacaaacaaaaccagttagtatttcaaaatgtttacaagccttgtggatatgaaggggaaatgggcacagagagtgggggcctcaatgaacaaccaaatgcgtgcatacaggatctgtgtcttcttcacaaagtcatgaaacagtggctggtgctgtgtgctctctcagagtctctattcagtgcctcctctgtggggaacttattctctagtcgcccatggtctaacttattccagacgcactcctacagttccataaacatcaaatactgcctaagctgcagggacaatgtttttgagaaggttgagaagggcgggtcagaggtggagtaaggagtttagtgctcagggtcagctcatcacactgactacagaaagcaaggagagggctgccagataccaggcagtcaactctgccatcgtgctgggcctcttacattgtgtaacactttatctttgattgtcatgttttgtactcacaatatctctggaacagcagcatttgaaagctggggaaggagaaagagactggaagtcagggccagagtcaccagaggctcaaccaagtctcttcatctcccggtgggttcactgcttgtgcctccttcgcttctgttcatcccccgggctcagtaagtgttgttgtcagtctgtacctaaccatttgaataagatcctctcacaccctgtaactttaacccctccacacacacacaccccgacacacaactagggtctttctggttccaagtatgactgtaatccttgtaagttatgaactggcctggctcttgctggatactagatatgctttgatggtggtgtcacagtcagctgtctgtggtagcctgacagtccacagtcaactgagaagggtctctgtgagggcctgcctggatcaggttggcctatgagtgtgtctgtgggagattctgattgttgattgagtgggagggcctaggccactgcgggcagcatcattctctggacaggaggtcttggtctgtataagcaagcctgctagacaggagcctgagatgggtccagcaagccaattttctgtggttccttcttgagtttctggctgacctcccccgacgacagactgtagcctgcaagcgtaaggtaaaataaaccccttcctctgctgagctgtgtcctgttaggagtgttttgttacagcagcaggaaggcaactagaacagacagcctctgctggcatttctctggcaccatgcacctcgatttagagattatttattggcctggagttctccaagtgagctacactggatgaccagtgagcaccagggatctgcctacccagccctctaaaacagggcttacaagcaggtgctctagtgcctggcttggtttttacctgggtgctgcaggacagaactcgggtcctgatgctttccaggctagcactttactgtgggagccatcagcccagactcctcctctggtctctttacaagcctaccacactgtttcacagagcgccatttttcaaaataccgaagactctgatctctaccaatcttcataaaattcagagggaagaagaaatgggagcacaagtggatgctttggcccaagttatgagtccacatagaaaaagggcagggcttccaaattcaatcaccgtctacattactttagaataatttcttctctctcccatgcctttcatgctatgggtggctgctgcatggtcattatcctgttttccctggaactggcatccacactctggaagttcccaccactcagccccagacagcaggggtgtcctgggccctgcagcctgtagcccatgttccctactccatggcaccctctctcccattcagggaaaagcagctgcagtgaagttcagtaattgctgtaatggaatttgcgaaccacttctatgtgattttaaagtaagtgtcacagtgcattgcaacagggagctaacagcatgttagcaggctcctgtttccatttaatccactttgccatgccagagttgctgtgaagcccgctaggacagccacattcggtgaataacggggcagctgggccatttatttctttgcttctcccctgctgcctccctgggtaggttttgaagtttagttactgctctgtttcctctgcggcagcccagggagtgcagcaatgggtttaaagtgcagccaaatttgcacgctcaagccatgaaagtaaaagatggctctgctcccgcctagttaccaaggggacccttggcccccatcgtgtctgtgcccatacagagattgggggtcgggcagtgagctgctggctctgggctgggcttgttatgggaagaatgacagagtttccaaacccatcctggaagtcctagttcccggttcttcagaatgcacccttatttgctaatagggccatagtggatttgattaaaatgtggccatactggaatggggtggaccctaactccaatatgactgatgtcttaataataatgggaaacttggagatggagagactgtgaacactatgggaaaactagtgttatgtttctccagccaaggaactacacagagctgtgaaggtcttctagagcctttgcagcagcctttttcaacctgtgggttgtaaccctttggagggggagaatgatccattcatacaagttacctaagaccatcagagagcacagatacttacattacaattcagagcattaccagagtacagccacaaagtagtaacgaaaataatgttatggttgcatgaactgtattacagggttgcagcatggggaaggttgggaaacattgctttagaggacacatggccctcagggttctggaccccaaagctagggtggcacagttcagcagactgcagttgtaggttttgtcagcccttcccattcacctagtatccctaactccaggactctctggagaactccgaacagctgggggtcaccgaagctctgggatctcgtgatggatacagactgcaggtctcctgccttcctgcctgactcagtgccacaagcttttgaaagggaaaatcccagcattcctctgtggaactgaaggcaaaggggtctgcgaggaagaaggggatttcaccgaacttggctttactctggcccagtacagagttcctgctctagctttattttttgttgctgaggtaaaagcacccagcaaaaagcagtgacgaggtttatttcagctcacagttccagggtccagtccgtcacaggaagaaggtcacagtgacaagagcttgaagccagcactcacatggaacctacaacaggagcagagagaagtaaacacatgctcactcccttgctcctgctcatgtgggctgctccactctcaatatcatttaagatgtcccccacccctacgcaccttggtaacagtgtcatccacagtgtgcctgcacagtgtgccgagtcttcacacatctgttaactaagacaattcccacagactttcctgtagaccagtccccaaacaaactctctctcacagagaccctcttcctatgagattctaggttgtgtcaaacaggagattgaaaatcagcatcatagtcctcaggatagggaggatttgaaagaaccacgtggccacactcctggagccctgcatctttatcttcagtgcagtatgatttgcatttgtgtttggcagtagcagtgatgttgcaagcatgtgatacttcagtcctgtcctcgacacaacatttgttatcatcagaagcaaccacgctgcaaagcctcctactctatgatttcggggacgtcaaggaagatatgcctcacacagagcaccgtgcaagggtagattcattagggagcaggggccccacagccccctggaaggcagtccgcaagcaggacacatcacacagggaacaaggcagcgtggcttctgagctcagtgctcatctgcccttccaacagccacagaactggtaagacaaaccataaacataagacaggacgtggggctcttttttcccagctactctgtgttggctgctgactgagtgggacatagagctaggtattaagaggtccacaaagcagattcaagatgcagaaaccaagtttccccttaagagcctcgcatttgtggtggtttgggtgagaaaagcccatcccccacaagatcaggtatttgaacatttggtcccccaagtcaaggcattggtgaaagtttggactttggactgtggagcctggctgaaggaagagcgacccagggtgggggctttgagcctttatagtcccctcccaccttcccattcttttgcttcctgtatgtggatgaaaataggatcaaccagcttcttcttcctgttgccctgccacgccttcctgaagtgatgggctctgcccctctagaactgtgagccaaaataagcccaccctttcctaaattgcctttggccctgccatttcatcacagccacagagaagtaactactaataccgtatgcttgtagaaaagcattcgcttagttcttgttattgaaagatgtcttgtgtatcacaagctggccttgaacttgctatgtagccagggcaggtcttgaatttcttttaaacttttaccacttcctgacacttgctggaattgggaacatgcaccatcgtacccagcttcttcacagatttggttttttgttttgttttttacttaaaagatttcattccaaatagaattttaaatatatgtttaatgagaacctgctgctccacggtaggcactggagtacacctgtgaactgagcaacccttttcctcccaagtgaccatggaatgccgggccacagaagcgagcaagcagcatgccagcattcatgcatgaggcatggtgctaggcccaagaggcaaagagtaaaagtatggtagaattgaacttagaatcctacgcgtgcatgcacgcgcgcacgcgcgcgcacacacacacacgcacacacagtgaagactgaggagaggagagcaattaccaggctgccagaacataaggaaagagttgtaggctgtggggtagaaggaagtgatgtcataaggtgagagacttggagaactgtcctggaggataaatattattcttgagtgcaactgcctactgtcctgggaatgctgaccctcttacctgtctggcttagacctgttcgttttttacattcaactttagagtgcttggctgtgtatgtctgtctatctgtccacctgtgtgtgtgtatgtgtgtgtgtgtgtgtgtgtggtgtagggtatatgtgtgtgatacatgtatatttgtgcacatatgtttgtgagtgtgtgttagcaagcaaaggcgagaggaaagcactggacaccctgctcttatgactcacagtcttatttccttgggatatggagcttgctagtttggggactgggctggtggacagtgggtctcaatgttttcatgtggaccccagctcccaatggtggggttacaggtatgtgggggtgctgggaatctgaactctgtccttatgcttgggtagcaagtgttcttacccactgggcaatctctccagccctgggagaggaatatttgaagagcactgagtgaggtgtgtgtgatagccactttctgaggccacacagtggagttgagggaaagcgtgtacacattcaatcacatctcaatattcaaagtacatatgaaagtagatggcatatgcatctaggaccgccacataaaaactaatgctttctttcccacaagatttattcttgctttgtttgtcccttcaactcaaccaaaactatgtggggagggactttggcttctttaaggggccactgcgagtgtgaccatgctccagtgagtatacagacaacacaaaatggactttccttctctgcccctgctgccaccttctcccgcttcttctcttcttcctcctcctcttctttagccacaaaagttgggggagaacctgggaagattggaaaataaatgtggttatggtgtattatatgaagctcccaaataatcaataaaatttttatgctgggaaacagcagacaaaaaataatggctatagactggagaatatgagttggataccatcatttactgtgacttggactgacttatttaaatctctgaatccctgctttattaccttaaaatataaacacaaatatttaccctaaatgatgagaaggaatggatcattgatgggggacgtccttctgtgtatgtttatcttattgattgttgaataaagcactgtttggccaatgaggcagcaagtttggcaggactaggagtcaaggaggattctgggaaatgtagtaaagttttgtgatccaagcaggaaatgacatagcaggcagactcagaatataagcagggacaagcaggaagtcattctcttcctcctcctctcttctctggagctgccatgtaaacccaacaagagaggacacatgccgccagtatcctcaatcagaaaagtctttataaaatatatagattaattattatggttgataattaagactgagttagcatgtaagaaatcctagtcattggccagcagctttgtacctaatagaagtctctgtgtgttacttggggccctcatgtggtggcaggcagaactcgggcagctttggaaagatttatcattacagatcattgtttagaaggtaataaacctcaaggagatgatacctgtactcttttctagtagcttatggaagcatgcctgtgctgttttaagtgtgatgctatgctaaatgaaaaagatttggatgatgaagtggtgtagagaaatggacatagttcatctgttaagtggtccatatgcattagtagctgaactaaaaggggatatttgagcccctgtaagtgaaatgatctagagttagatttttactcccagcatcatgactggatgtagtcaaatccagttaagccatctctactttggaatccctgaccagctagcttgttgcaagggacatggcggctaccatagacatcagatgggcatatcaccgacgcaacagagcaatcccaatgggactgtgcttcttctcttaatacccattcaaaatatatcaagacgtttctgaaaagcccatcttgggtcttgtcctaaaagcccaacttgtctgaattttctatcaagaccaagatcaaatgtgtgtttccctgaaagagtgagaaacccagttgtctctacctgagttgaggaaaggggacactgtggctgcatgcaaaataagtgatatggactaagacactgtggccagtgctcaggggccctgccatttgccttccagttttctgtttctaaacacaaatctatgtctgtatatattgccttttagatgcactcggtcacaaaataggtcacagtacccaccattgttaagtcattcatacaaaagtgatacacagtactgtgactgttattcttgtagataaatgtagcactcatagaccttaaagtctgtcactgttaaaccaggtgaattcatactttaactacttagtgtctcatcaaatagatgggtggccgggacactggggggaacaatctcgattggttagatctgagactatacctccttctatctatggtgtagggtggtttatatgtgcaaatgtattcattgaaacccatgaagagataaaaatgtgtttatatgatccaaggctgacagcaaatctctgcacctgagacaggaaggttggtaccgacagcccctttgccgtctttggtcacctgatctggtctgtggagggatattgaatttaccactcttgggtccagagaccacaggaattgacacggatgtacactggatatttatattgcatacaataagcagataaggatggctttgagtatacagagaaatgggcacagtacatcgttaaatgttctgtataatgaagatgagtctgaaatggttgtgctgagttggagatacggaggataggactccagctctgcaggctgttacaagcaaaagatgcttttcaagaacaaccaagatgggaaaatcttcattaaaaacaatgtaagtcatgcaaagttattttctttcttaaacgcttctttcccctatttgccaatgaaccatggttgtgatttaaaaaaaaaaaaaaatggctctttgctgatgctgggtttcagatcacagtggtgcccagactctgatgtcaccctgccccaagctgagtcagcagctagctttctgaaaaactcaggacccttttgtaccccagcagccctgggaccctgactctggccaagcaggcagcacagcagccttgccaatttccagtctcccctgccgtgagagccagggagaggaccaattaatgcaagctgagatgtgaagaatgcatccactgaggaaaaaaaaaatccctccctgctgtcctggcagaggccactgctgggccatcagatgtcagtagctttcagtcactcctaagccatctctccagggcttccttgcacctggccctgtctctgcctggctgcagaggccatcagatgccttcctggatgtgagcgtgtgaggctctttaaatacagcaggactaagagacactcgaagaaactaaaccagaagcatgggttgcagcagcacttagagaagttgaggcagggtgatcaaggaactcaaaatcagtcttggctgctgagtgacttagaggccagcctgggctacaatgagaccctgttaaaaaataaaataaataaacactacaacagtgattctgaacacatagtagaaaaaaaaaaaagaccttccctgggcatggttgtgaactgcttgttttgagaccatctgagtaaaagcacatgtattcatctagaaggctttcccagataccaactcattacatatctggaaagaaaactgccttagacctctgcccagatgagccggtggtgaaatcatgcagagttgcttttagggtagaatgagacatagcaaacatttcaccatgataaatacataaaacttgttttacagagcccccaattttgaactaataagtctcttgctaacacatcctgacaggcagattaccaagtaaatacaatgactacttgctgctttattgttttcctttcagagtttggttgtgctgtctttcagctacagaaaagcaaggttatgtgaccttcctgtgcccctgacagacctatgaagagaagtgagcttttgctgagcaggtatttggcccacacagagtcctgcagccagagagagaagccacaaaagaagcagtaaattgggagttggagagcctggtctgcagttaagagcactggctgctcttccagaggacccgagttcaattcctagcaaccaagtagtgtggctcacaaccacctgtcagttccaggggtcctgacaccatcttctggccttttcagggacctgagcatatgcagaatacacatatacacaaaaataattataaatctttataaaaagaagaaaaagcttgggggtcagaagtcactcattctcagcaaggtcacatggagatgacaaagttggagacaaggcaggaagagttaaatgtcagtgtatgataaccttggtgtgaagacccccaactgttggccagataaccccacctgaggtttgctttcataccgtgagtaccttcctgcacccctcaagagcaggagagaggaggccccagaaaaccctgacttctgaagccaaaagcagcctgtccatgaagattgggtttcgcctgcagttatcacttccagcggtctgccacacagaaggaatggggggcccaagatacctgtcacttagtcatagaacaaaatccacactgtgtcatttcccagcttcaggggcttaaattcatatttagaatgtttcattgcttttctgacacactgacccttggaaaccccaatcttctcaaccctctgctgctattcccaggctactgaaggctgcagaaggaaggcacaccaaatggaggaggtgacaagggtgggtttccagtgcagggggagataaaaattggtagctacctaggacatcacagcttatgaagatcacatctgatatccacaatcgcctgggagggaaccaggtggccacactgccctccacccagcttacggcacatgccagcaatgcaggatgggtgtggcacctttgtcactccagatctcatgttctgtgctaagggtccatctctggcacgttaaagtgaacgttggcctatgagaaatcaaagttttaccacttgctgttccttctgtttaacagatgagccagctgaacctggttcacttgttcaaggtcacagggctgctggaatactgaggccagatggatgcagttcgtctgcccattatatctgtctaatatgacttcattatagcatgttattaatcaaatgttgcattctaaaggaggaaaccaatgccttcctctaagaagaaggataaaatattgaacttttccccttaaattattctaagtgttacttacatgtcagaacaggaaacaaagtcacatttgatgagacttctgtttcttttcaatgaggtttttggcaaaattgcatattttacatatattgatctgaaaaagttgagaagtgcaagtgtcattcctgtgaaaggcgcattcctgaggagaaatgtttgaaaccaaatgcttactatgcttaacaaagctaatttctccagatgaactttaaaatcagccagtttgttttcaaaaatcttttcccactggcttccgtctcttgatcattttgcaatctgatatctctccagtgctctcctgtctgcaaactctgtttagtgcaaagctttgcaaaaaaaaaaaaaaaaaaaaaaaaaaaatctcttatttgaccatgaactttggatgatctagttagcgctactgtcaagcttcccgcggtctttttgaaaagcaggacttgtccattctgccctctggccaacttcagtgggactacaatgctagcaagagccatcaaactgcctgacggcttgtcaccagcgaggctccattaatttacacacattttccactgtttggcacctaccatgataactcttttctcttccaagcggctcctgtttgcatttaacacttgggttaattttcatcagagtttaaatttagccatcagttatttcaggggagctgtcagccaacatatggagagagagagaaaaaaattccttctgaatttataataaagtgggatctgttgaatgtgaaacaaaaccaactgcaatgcacggaggccccggtggggagagcggggtcagagaagaattgcagagtggattagctgctctattcaccagagccacgtctgggcacctccggagcttccggatatatcaaaaaatgatggaaagacacagttcaatttgtcccccttttataaaggataattaacctgtcagtcttgctactttaacaacttcattaaattggaggcgaaataggtgctgagaagtcttgttcctatccaaaaggaacacagggccctggtgtaaatgcagggagaagaaagaaaaacacatccacgcatacctccataatgctgtctgcctcctgaaaaatggaacacgcttcttccaattatgtaataatttgcctttactatgacctgctaaaagtaattttcttaacttggaaggcagagggaacaatgtcacagcccaagtaggtccaagacacataccgttttaaaattgaggttatagggtttccagggctgtaggccaagccatttaagacctggagtgatggctacaggaggcgggcatctctcaggtaagaagatgcaggaacagctcctagactctccaactcccctctgctgcccatgtgctgttttccgacgtctcagccacaggggggatgtctgcttctatgaagactaaccttaaaatatatccgttcctctgagggaaaatgatgcttaaatccttctctgtctaaaatcttatacaatcctagacttgtgttcctgcaagtagatgctaaaacaatggcttgattaagattctactcctttaaaaaccctattctgtacaaatacggcaccggggcacaggaagacgctaatgataaaatatgtctcaaacttggtactttaaaaataatgttacttcctcttgacacagacatggtttatgacactgataagtttatcctataatatcatgtttcattattataaagatactttaatgactaccaaataactagccattcagtaaagtggaacttttctcagaaaggaatattgtaagtttttaaaataattaaaaatttttgtgataattgtatattttcataaaaattttaaaaccaagattttatcaataatattagctccttaaggcttataatactaagaaacatttcatttacgatccttacaaatcagcacttttcccatcttaaattcatctgaagtgtttcattttcagcaatttgcaaacaaactagcaagaaaaaaatagaaaattgtacttttgacacaatggaaaccactttggtgcaaaactttaaattatatctcaagtggagattggagaaacagtcacacacacacacacacacacacacaactccatttggcaaggaagtcagaattcatttgtgttttatgtgaaatgagtgttggagaagcctctaaaataaaacagttactacaatagctgttttaattaaaatttcagaatggagttcatacatttaagatgaaaatgcataatttcttagaaacggggttttgttttgctttgtgatgcccctgcagatgaactgggttcatagactttctggattcattcagtcatgtgctatcaagtggggttttttgtatatcacccaactaggaactgtattcatcactaggaaggcatttttgtcagggcatttggaaagagacctggcccccagcgaactgcaaagtgactctctgctgttcctgcaccacgctggtgtcatccctccgtgtgtgcaataattaagatgatgtgtcttgtgttggtccatcttaagccctgtccacatgcatttgcagaggacaacgaactgggcccacccctctcctgcagggaactcagagagggaccgtgatccggagtggcaactgttcttgccacgggtgctttttcaacttgtagtcgagctcagaattcatggtgtggacgtatcactgtaagtgctctttcaggacaatgacacaacctgtctacagataacacttggcatgtttgcttgctgcatcttttagaggaaagacccaagggccattaggattagcaagctcctcaattgtgttaccctctccagctgctctggactgggggcactgcagactgaaaagcaaatgactctgattccatctcgctaatgtcgagagactggacatgtcaggaaggaaagcggcaacgtcagagcttgttggtcatgaagtgtggataaatggaatacaacagggacaggacaaggcaggcagtgcccagagagagagagagcccacgttagcatgcgaaggttaggttccgcagactgcacctctgaaaggaaaaggcagggtgagtcaacagctggaccatccaaagcaagctaccccacacctcccaaaagggattcaaactatcagccactctgccatctggcagcccagttgtgtgggacaactggcttttcctgctttgggatgtacacacgtgataatcaaattgttttcaatgaagaacatgatgttttaacctagctgtgtttttcatgtgttttattggaagacaaggaatgctgctaatttttagacatcaaatgccgatcccagtgtgaaaacaagcagctagtaccactaaccacacacagtggaaagctaaattccctactgtgggggaacgcttcaattgcctctgatttaatcactataatttagtcatttgtgaatgtagtccgttatttgtcgatcatgtggttttttgttcagagggcatattttttcaccggtggccttcaaatatgtagttgatgtattctagggatgcacaaaattatcaatgaggcataaatataattaggtctttctgtagatcactggaaaaactctgcaaagggttgtccgagccttgttttcagaccaagtccttgctgtgaagttgcaatagtagcttgagactggaatggcagggcttttaaaattatgtttattcgtgtgtgtgtgtgtgtgtgtgcgtgtgtgcgtgcgtgtgtgtgtgtgtgtgtgtgtgtgcgtgtgcgtgtgcgtgtgcgtgtgcgtggcgtgcgtggtgtgtgtgtgtgtgcgtgtgtgcgtgtgtgtgcgtgtgtgcgtgtgtgcgcgtgtgtgcgcgtgtgtgcgcggtgtgtgagtgtgtgcgtgtgcgtgtgcatgcgtgcgtgcgtgcgtgcgtgcgtgcgtgcgcgtgcgcgtgcgcgcgcgtgcgcgtgcgcgtgcgcgtgcgtgtgtgcgtgtgtgcgtgcgtgcgtgcgtgcgcgtgtgttgtgtgtgtgtgtgtgtgtgcgtgtggtgtgtgtgtgtgcgtgtgtgtgtgtgtgtgtggtgcgcgcgcgcgtgtgtggtgtgcgtgtgtgtgtgtgcgtgtgcgtgtgtgtgcgtgtgtgtgtgtggtgtgtgtgtgtgcgtgcgtgtgtgtgtgtgtgtgtgtgtgtgtgtggtgtgtgagtgtgtgtgtgtgtgtgtgtgtgagtgtgtgtgtgtgtgtgtggtgtgtgagtgtgtgtgtgtgtgtgtgtgtgagtgtgagtgtgtgtgagtgtgtgtgtgtgtgtgtgtgtgtgtgtgtgcgtgtgtgtgcgtgtgtgtgtgtgatgtgtgtgtgtgtgtgtgctgtgtgtgtgcatgtgtgtgtgtgtgtgtgtgtgtgtgcgcgtgtgtgtgtgcatgtgtgtgtgtgtgtgcgtgtgtgtgtgcatgtgtgtgtgtgtgtgcatgtgtgtgtgcatgtgtgtctgtgtgcatgtgtgtgtgtgtgtgtgtgtgtgtgtgtaggtcagaggacaacttgcaggagttgcttctccctctaccttgtgggttctggggatcaaacgccagtcatcagacttagttgcaaatgccctcacctgctgagccaaatcaccagccaaagaagcgggttttttttttttttttcaatttttaagggctttatatttatttatgtgtgtctgtatacaggtatgccaagtgtattcaggtgcctctggaagccacaagagggagtcaggtgttttaggtggcttcgagccgccatccaatgtgagtgcaggaatcaacatgggccttctggaaggacaagagctttaggactctccccagccaagtgacaggaaataatgttggggcagggactatgagcaatgattttccgtattttatataattctctgttttttgttccatgttaccacaccataccgtaaactatctatcctcacccaataaaaggaatgaggggtatgattcaagtaaatctctattgggtcaattgtctggttattttttaagactgcttattggactttgtgtctgtaagggggtctatttacaaccatgggtgcagagagactccatatccactgaaaccagcgccccttggcacagacagtaaggaaacacttcttacacatcctttacccagggtttggagatggactatttgaacgcctctccatgggtagtctttggattttcaaagacagtgagtgaccctttccttccctggaggtcatggtatctttcaagcagctagccccgggggtcagggggcagctgaagccctgcagcagtgaggttgcaggctctgccttgcaagtcaatcctggtcttgaatcaattaaaatagttcctatggaatttacatttttcatagttcatagatttttaaaccataagatttaagaggtcagtttgaagacacctgatggtcatacagtctctcctaaacagtgatctccaggttcaggtcaagaccctctgaggtcaagagcaagaagaagacagtttcaaacaggctcagattttctctccagcctggtgcgcctggagacacccttttaatggccagcctcagaaccaggagacaatgagtttctgttattttgtgatttaaacagctcaaccgctaacacacaggctttaccctaaggttagggacagtggtcttttattaactagcttcattgtagttttttatatctgcagtctgtaaacacaaatatgtagctcattttgcacaaactaggtaaagaaagtgtattcattttagcatgcccacagtggtttggactcgtcttttaagtgctatgcaaattaaccgtgtgaaggtgataacatgacagactattagtgatacttgtaagaaaaaaaatcttgtattgtgtaaacaaataaaatgcaaaaactgacatagaaagatagccgttgacaattcctcaaatttgatatcatctatgccactttgatctaggaatggtaccaagaaaacataacttagtgtgacacagagacatctgccttgtgatcatgtgacctcagctgtgtgtgagctaatgcagtgaagcgaagcaaagagcagaaatggggtttgggggaagataatggtgaaggatggaaaatctcaaacagaaggaataagtgtgagagcactcgccttcaatcccagcactcaggaggcagaagcaggcatctctgtgagtttgagaccagcctggtctacacagtgagttccaggacaggatagccaagctatgtagagagaccctgtctcaaaaaaagtttgaaagagtttagaagaatggagttaaccaacatgtgatgcacttaaaaattgctacacacacacacacacacacacacacacacacacacacacacaatgggctttccagccatagagaagaatgcagttatgttgcttgtggtgtgggacactatatgcaactgaagaatgaagtatattaagacaataagccagtcttgggaagacacatgtacagtttctctcatttgtggttcctagattatatatatagttacataatttcatgtctgcatacataaaatggaagtcaaaatgaaactgaaattatctgtggaacagaggaaagagagaggagataatggtaaaggacaaaaagtctcacacaggaagacgggagagagaggcttgctcaacctacaatacgtgtgaaaagtaaagaggaaatactatatttaaagtgtttaaggtatgacataatatgtagtaaccagcttggtttagacagttcgtgatgcatacacacttaaaacatagtataggataaatgtgcctaattttgtagatcaaatatttttgaaatgtgatactaaaaatagaaagaggctagggaaatggctaggcaggtggacgagtttgtagtgcaggtcttatgacctgaactgaagtcctggaagccacaaatggattccaaaagattgttgtcaggcctccccatgcatggcatgtaccctgtgcccataggcctccccatgcgtggcatgtaccctgtgcccacaggcctccccatgcgtggcatgtaccctgtgcccacaggcctccccatgcgtggcatgtaccctgtgcccacactcatgcacatcgtacacaatcacacacgcagatgaatgtttaaaatcaaagggaaaacacagaaaaaaggaaaaagaaagctggcaggactgagtggggctcagggtactgggcagctgtgagggacaagacggcattaggtctggggtctgccatgctgcatcagcaagatcccttcctctttggagggttcatgcacaaggctcctgcccaagacgccatttgaaacaggccttagagcaattgatacaggatcaagtaaaatggctcggtgggtaaaaacacttaactgccaagcctggggacctgcatttgattcctgagatccaccatggttgccacatcacgacagacacataaaagtaaatgtaaatttttgatgtggaaaaaaaaggaacagatacaattgctttggtatttcctggcatgatcttttccagcctgactaccctgtattccaacaggccatatgtaagtgagcaaggaaacagtccaaagtcttgttcgtgtgattcaagtgatagccccgtgtcccgtaagaacaccatgtgaatgctttgagtttctaaattcacacttgcaagtccctggtggttctgagtttgttaaccttagtttgctttctactgcagtaaagaaaacatcatcaccaaaagacttgagaaggaaaaggcttatttggtttgcatgtccccattacagttcatcactgaggggagtcaggcaagacaggaactaaagcagaaccacggaggatgctgctcattgccttgttcctcctggcttactcaagctacttttcttgtaccacccaagaccacctgcccaggggcgacagctcccagactgggctgtgccctcccccatccatcaccaaccaagaaaataacccacaggcttactcccaggccaacctgatggggcgatttctcaaccgaatgtctgtcttcccagatgactctagctggtgtcaggttgacaaaagactgaccaacaaaatgtgtttctctgaacccacacctctagggagagtgagatttttctgccattatcgccattgtgtcgtgtgaaaacctcaaagcctcttctgctccagtgccttctgccattccgactatgtagtgtaggctggactcactgtcagcagcgtccctgcctggccccccagagtgctggcatcacaggcatgagctatatgatgcttgcttgaaaatcgtcctgtgcctgtagtgttgaaccctgtcggtagctttcagagccaacatggagttctggttggttatcttcccctcagctgtaagacaatggaggcaaatgctccttacaccagggcctctagtgctccctggagagacctggctctctgccaggcctggctgtatcagcagctgggctgaactcagttctgctttgttgagttgcaaatgactcccgactcctgtgggtgtccctccctgtggaagctatttgtgtcatgtgactcacagctacctataactttaggtccaggggactctgtcacccccccttctgtcctccatgtgcacctgcactgatgaggagcgcatacacacacacacacacacacacacacacacacacacacacaaacatacatacttacttgcaggcaaacagtcacacacataaataaataaatctttcaaaagaacatctgtcactggtggcgatctaaattgtacctctgtggtagaaagctcactagtgtaactccccaggtttgattctagtacagaaaagtaatctcaaattccttaagtcacgccaatcctcaaggctctttggccctccatttatttctcctgatgtaaagaacgttgagtcttagcaggaccctcgacagtacaagaagatgaatgcttttctgactgaccccctttccccccaccccaccccctgctcctgtgtcatggccttgaatgttcttagtcctcagtggctgagtcttagttcacttcaggagattctatcttctttcccgttacaatagactacttggtgaccaggaataggacttaatttgggttccttgtagagctggtggtgctggctggacttaagtatgcaattcatgcctaggaaagaaagttggattcgatgacatgatttctaaagtgttcttgagcagagcaaacatcacagtagcaatcctgctttgacagcaaaaggagtgacaggaaagtcaatttcagtgggtattcctgacagggtaatcaagatgacattgatggcagcggcggtggcagcagcaaggtgtgctctctggcttctgaggcaggccactcctgcacactgtgggttggtgagaaagaactcatttaacagagaagtttcagctaagaaccagggagaacctgagaatggctatccgtcacacaccggtctcaattctggtgatcaggaggctcttatggaaagcccattataaagacatgaggtagtgtgtgaggctaggtgcaacaccagtgataaccacacagggagaatgacacaccgcagtaagccggacttgcagagtttttcaaatattttttgtattcatataaaaagatgataatggataatgaaattccctaaaggggactggggaaatggctgggaaacatgtcagctgatagtttaatatgcatgcatgaggacctgaattggctctcacataaatgcccactgaaggtaggtggagagggtaggagacagacagatcctaagagctccctgtgtaacccctccggttgaatcaatggtctcaggtgtagggagacaccgtaatcacgcctcctaagggctggctacaggtgtgcctgaccacgcctgtcaaggcttggtcaaggtgaggtcagagtgatgcaggctgggctcttaaggacaaggagcacatggaactctctcttccccttcagatgcccttctctctggcctccctgccttgctgcctctggggacacactggcttgtgtttggctggtatttatctgaataaaagtatcttgaatctacaagccttctccttcagttggcgcccaacgtggagcacaaaccaaggaccctgagattaagagtctcatgctaacacttatgtttgaatcccacacagccaatgaagacccgcctgacagcaatccctggacactccggaaaagaaattgggccatacctcctcgactacactggatccaacttactccatttcacctgacactacgaccacagcttcaagtactgacttcaatcaagttgaggatttcaacctagatcttcaatcaagcaaatcccatctaacatggactggatataatctgttagagactttcactatactaacatttttttccacagcaccccacaaggctaccatcgtcccatttcagcaggaagtaacttggaggatgctaaacccccgttccccattattgtctattagggtaatgtaagcctagttaggaatgaccttcctattgtttagggttgggattggaaggaggtgttcaggttggatacccctttctgatgactttagggcttagctggaatagacatagttaggatgtgcaataacagattattgtatcttcttgtatttcacctttatgattgttaattttggatattttacacaattaagttttaatcctcttttagactaaaaggggaattgtagggagacactgtaaccacaccttctaagggctggctacaggtgtgcctgaccacacctggcaaggcttggtcaaggtgaggtcagagtgatgcaggctgggctcttaagaacaaggagcacatggaactctctcttccccttcagctgcccttctctctggtctccctgccttgctgcctctgggcacgctctggcttatgtttggctggtatttatctgaataaaggtatcttgaatctacaagccttctccttcactcagggttcacagagagaccatgcctcaaaaagtaacatagagagtgactaagaaagatacttgataggggcctctgacctcacagacacacacacacacacacacacacacacacacacacacacacacacacacacacaccaccttcacccctacatccatgcatacacacataaaatctgacacatgacagtattgccacttccccttgctgtcttgttttgaatccatttgtgcctttagaaaatagagtcaaatgctggtcatctttaagcacgtcctcagagggggtgctgtgatctctgaacaagagtctcttcattgctccctttgctcacacagtgagagcatcttcctaaagatcaatacttgccaggaagactttacatgcttcagtgttgagtctgggcattcactgtaaagggcctcagggtgtcaactggcttggtccaaataaattgctgatttctcatgatcttctgagaatgtcctcttctcggtgtttctacttcaccaactctgtctttcttctcatcttcctatttggaaaagaaaattctccatattttcagggcagccaccaagcatgtcttattcatcacatgccccattctgtttccctgcagtgactacagatttccatgatcacataggtaatggggcatttgggatttgtggaataaaactagcccagttccccaaacgcttaccccactaccccctctgcattcagtttgctcttatccatatggttttagctggagtgccttcctgtatttcatgtgttcaccctgaccttgcctaggggactcccccatgtcctcaaaggcaaggagactgtattcttcatcccagaaaaccagctagaagctggctgtgcgtctgaaaataacagggggcaggaatacctgaacagagtggactgcagaatatatctcatatttaacacagctcaggaaggcagagaaatcagttacacatacatgtgcatgcacgtgcgcgcaaacacacacacagagagagagagagagagagaaagagagagagagagagagacagagacagagacagagacagacagacatgcatataaacatttgggtggggggaggaagggggagacacacacactttggatatatttataaattcttggagcccaagggctccttcaccagtctggttcacacaccagcccaccaccacagttccttctgaggctgggagaaacacaacggccctcttcccgcaacatgggagcgaagaataagcacctggagtggaggatggatatcctgctgcttccaaacctcttggtgaaggtgaagggggcttgttgaaaacattgctgtgagcagatgggcccctgaaaccatctgctatgaagcaactgaatgttcaatgatgcattacagaattatttagctctcaaagagcctgaaagtagttagtaatgatggcatctgcactgagagcaaacagcctatttatatatgatctattacttcataagctgcatgcaggccctcacttcttaaagcagcagccgtcttgattgcaagtataagatggttgctgaaagaaaacctgtaaagtacggtcttaagattagcgtctactgtcttcccatgagtaacacaaacttttgtcaaacccagtatacccatgattcccctgtaaaagtggagtgggctaagatggattgttacaattttaatgaaaaggtaaataaatggatttatatttcctaaaaccatgtcctctggaaatttcaccttctttatcttttctaaaataaagtttgtctattaaagaaaagtacatggtctttatgctttaaaaagccaaacatattagagagcagaaacaagtctctcaccagaaacagtcaccttttaattcttttggtttctctggtgtgttgttttgctatgcatggtttaattttaagacacttttattaatgccttgtaaactcttatatttgaactggagcaatggcttggtggttaagattatgcactgctcttgcaaaggacctgggttcagttccctgtgcccacatcaaaaggctcacagtttctttcactccagctccaggggatctgatggtctctgctggtctctgtaggcacttgtccatgttcacgtacccacacaaacacaaagacaaaaacacacatattttaaaaataaaatcttaaaagtgtgtgtttgtgtgtgtattcattttctttgagttttttgtgatatacaaactgataatatatttcctttattcatgatatcctggaaacaacaacaattcaaactgttgtggtcacaaaatatactgaaacccagcactgaatcttaatatataccacgacagggctgcatctaaaatgttttctgctacttaacaaaagccagagctaacaatgaccaggccatatggttgccttccggacaaggcaagcctgcagagtgaaggacaggtcaatggtacccagtggttagaggtcaggaaagggtttgacgagagtcagttgagggaaggattccttgaggtgctggggtttttctctatctcagttgaaggagagtctccatgattcattgcatttatagaacacacacaactgcacaacaaaaaaggaaaacattttattacacttaacatattttaaaatatatctctacaaagagtataaattgtagaagttatcaagtcacagttttacatttttctcaagaatttgtttattctatccacaactactgggcactattgttttccaggccctgggggtcctggcacagtagtggtaatgagagaggtagctgtcttcggtgagtttgcactctaggggggagtcactctgcccggtaaggaaccggcatgtcttaagtctggcagaaagcagagcagacaggaagaatcaaaggagggcctctcagagaaactaacatttgagtaaaatattgaaagagacagagggtgacaccggccacttgagcaatccaataaaaagtgccaaggcccagggagacaggagctttatgtgacccagtgagagtgggttgactggtccaggggagcagagggatgagcatcaatcatccatgtctggtgagggccctaaacacctaagaactatgcttggtgttgggttttaagcagggggcagtacgctcttgccatctctgacagaatcctactaccttgtgtggctagagagcaaccaggtggggggggcggggagataaaagaggcagggccaaagctgccaggatccaagaggaaatgaaagtagcttggatcagggtagagatagtggagttgatgaggtgtgattcggaacccatctggaaataagacaggatttcatcacaacatagacatagactatagacgattcaaggtttgggctctgaccaactggaaaaaatattttgctgttaaatgctaacagcaagatggtagaacaggtttgaaaacacttatgaggagcctgtaattgtcatgagtgaaaggtgggctttcaaaagaagaagtcttatagacagtcatttgtgagtgtgtgtgtgtgtgtgtgtgtgtgtgtgtgtgtgtgtgtgtgagtatgagagagtgtgtgtgagtgtatgtgtgtgtgtgtgtgaatgtgtgagtttgtgtgtgtgtgtgagtgtatgtgtgtgtgtatgagtgtatgagagtgtgtgtgtgtgtatatgtgtgtatgagtgtgtatatgagtgtgtgaatgtgtgtgagtgtgtgtatgagtgtgtatatgagtgtgtgaatgtgtgtgagtgtgtgtgtgtgtgtgtgtgtgtgtgtgtgtgtctatgagagtgtgagtggtgtgggtatgtgtgcatgctcatggaatgtcagagggccatcttgattggtgttatccaaacaccagccacctgcttttgagatagggcctttcacgggtcttgaatttgccaagcatgcaaggcttgcagacagaaaagtgccaggaattccccatggtatcacaggtttctgcacccctctttaattttaccatgcattctggggtatcaaatgcagttcctcaagcttgtggagcaaacactttaccggctgagccatcctttcacccgactcctcccacagtcagtttgaaacgagttctggattcagaaggacacttgagtggagatgcaaatttgggtgtcatccatatatagttgatatttaaaaatcctagctctcatcctcatcacctcaacttaaacggtgaggattttccaaactgtagcaaggagttctcaagcattggtcaaccgagtggttatggggagcatctgatggccctgacacccgttgccttgcagtttcttctcaactttcaacacatgtgcagttgttctcccctgttcccaggctagctcacacttcccaggggacccggagccttccagcttctgagtgggttcatgactgtgttaaggtcggtgagttttccttgtgatgaagcatccttctctatccagacactcagtcagaaacctgaagcaggcattcttttcagtttactaagaaacagcgaatgtatacgatccaattcttgacaaaaatttgcttccaaagtataggctgctataaaatagcaaaaccaaactcaccgaacactaaaaaataacatttagaaaacactactgagagcaatattctaagtctcttcccctcattctctctttctgccagccacccccaagtgtgtgtctcttgtctcgtttttattgtatcactttaaaaacaaactttctgacatataggtgaccaatctaaggcgcaatccatgtattatggatgcctcaaacagggccatggcaaaagtaaccttggacctgtaagagacttgggctacttcagagagagctgccagcataacccattatgattaaaagaatagctgccttcaatcctttcctcactgatacataatgtctgggctcatgaagtagcttatagaaggaaagacacatttcatggtcaggttacctagcaactcttcccctcttctaacccactatctaacacctgcaccctgtgtgtgaccttgctaacctcctgcactctcaaggactcatgcacagggacattccttagcctggttatcaggcaagcagcctcaaatgacctctcccttcttgccaaactccctgcttggcacccctatatcaggtccctgtgaaaaataaaaaattgcagcttgatcagaaacctgtcttgctgtcattccttgttctccccgaccctatcgttctaggttcgttggtggctgcagcacatcggggtgtgagctcgtgtggttccccaccccgtctccctcatgcgggttccacccacctctacttcccacctacctctcagcaactgtgttcctcaaccagtctgcctaggactggactcgggttctattcctcgtagtgatagaatgcttgcctattctgtagaagctatggaggctcacccctctgacaggaagtccagtcctgctctacccctccaggaagacagccggtcctcccagtctccactgaagtgacatccgccaaaggcctctgattgttcaaaaagcagtctgatgtcagaatcaaagtgtgttagttaattggccctgcaaaacaagtggcagattcaaggtgtgaacagtgtctgcttggtctactggaacacccctccctgacacttcagaacaaatggatgtgctcttcctcactggggtccaccagagctttcaaccttgacctgcagggaacaccttttctaggagtgacaggtaatttagctttctcactaagttctggggcctccctggtggtgaattatgtatggtgcttccgtgatacagacacccgtccaccgagagccaaaccacagatgatagaatcctcttaaagaccttagattagatataaactaccctttccccctagaaatgccaatcactatgccttccctttcctccctggtttcagtcggacatttgagtgcttctgaacaccaattgcctctgagggacgtgatcaggcttctttctgtatctaaaatagttccgaaccccttttattatgagagtaacctggtgaacagtgaattactggcacttataccctaccacacagatctttccagcgaggatgtttgaccagtctcaaatgcagctttttgtttgatgtttgtttctttggatttgtttgtttgcttttttgagacagggtttctctatagagccctatagccttggctgttctgtaactcactggagggccttgaactcacagagatgtacctgcctccatctcccaagtgctgggattaaaggcgtgagccaccacacctggcaaaagcggcttttgaagtgaaaacaatcattttacattggacacccagtgaatgaaatcatttgtgagtcataaattaaatatttcagtgtgaaaataggtaagaaataaagtcagcggtgtggcaaaaatctttacagacacataccagggcaagcaagacacagagggctgaacctttgggaaaaggcttaaagggctcaagacaggtagtgggagggtagacggagtcaaggaactttggataaggacagtcaggtaggcttctccaaaatcaacttcacacatccatcctgctcagatggtacctagctagcccagccttctaaaatagagaaatgattcaatgtgactgagagctctgtgagttctgtttctatgctcactgtgtcattctggtggcaatgaaagaacaaggcacttagacactccagtgccattgtctgaggagcaatgcctagagtggggagtctgcttggagtgctgtgaaccccttagcccagcatcgacttctgaacctactttccttcccctggaggtaatggaagactcccacgcccctgcagcagaagctactgccctacttcttgtccatcagagttccagaagggaaatgtgatcaccccatggctcaagagcaggcaggtccgcaccccttaaagatgggatgaaagtggggaggactctcctgggatgaacacctcccacagcccgagcaggcaatgggatctcattagaaatctaacacaatagagacatgcagatcttaagagcggacgcagagagcacatcaaattaacttcattattttattctgcatcccacagcgcttctgccaatgggcagatcagtggggcgatcaaaaggcacaaactcccctggaaattcatcgtctaaagccagactagggggcaagaagtcctgaagggggaggcaagagcagattatgttgacccaagacataaatttatagtatctgtccacattcatgctagccttttttttctttttagcttccaggtcaatgtgttgctttatgtcagctgtgcagacaggaccaggaggcaggaaaataaacactagggcatgccaatggggactcacttaacttttagagccttgcttcttacaatgtctacatttcacaaagcccctagaattatttaaacaggcacatgcactttgtaggaataattatgaatttcatgccaataccttatataaagagaaacataaacatttagaagggaaaatgtaaacatccaattagtgatatgagtatttttttttttagcaagagaaaaaaaactctatcacaggcaatgggatctgagaattaaactacagaaagcaagacaccaaatgagctgggatagaacttaacacacaccgcatctagcaatagctgagtgagttactagctgctatagtttgactcttgggtgtgttgatgggttggttcttaggccattgcactactgagaggtggtagggcccagtagggtatgatgattagcgctggcgtcttgacacaacctagaatcacccagaaagatggtctcaatgaggggctgtctacagtgagttggtcccacggcatgtctgctgtgggaatgtcataagttaagggacatgaaagtatcccagcccactgtgagagacacactccctggcaaggaatccgaactgaactgtgcctcagtggagaaacagacttgatgacaagcaagtgagctcccatttgtgttggttcttgactataaatgtgatgtggctacctgaagccctgccttgatttccctataatgatggactaattgtaagccttctctaccaaattgtttttggttaagatacttcatcgcagcaacagaaatgaagttagagcagaggggatatcaagtccccatcccatcctctttctgcctctcacccccctggggtgaacaggccttccctccacaggctcctgacatcacatgctatactgcacaaacccaaagcaaaaaggttgaatgaccgcagagtgaaaccaaactgtgagcccaaataaggcttccccttcttaaatcctttctcatgggtatctgtcactaaaacaagaagctgacagctacagcgggagctgaaataacacaccagaaaaataaggaagtacttgttgacttcccagaaaccacatggcaagggtataacagacagacactggaaccagctcaactagctcccagtgaccaaagctttgccttcatacactttaagcttttaatgttatgttcacttttccattgcccttagcaaccacaccaagttcatggtcagtttatatggattgatttgtaagtgaatgggttcagggaaccccagatgggacttggccccagcaggcccttgaatctacaacaattaatcttgggagagtcaagggaaacacagggggcaaagaggttctgtgaatggaaggaaatggagtaagacagagaaatgcaggtgacctcagtggagtgattaataattatacatttaaaaataatctatctcaacattaaaacatcctttcatatttcacagacttcgtacaacctttgagcaacaaagttgtaactcaagactgtaagtggaaaaaccaaaaagaaaaaaaaaaaaaaaagactgtaagtggaacttccacacgtccattgctccatacggatataaaatgaatgggccaaggaagggaagggagaagagcctacactctccatgccttaaatgtgggtggttcatggtgcagaacgaaaagaaagcagatgtgaagcacgcctgtactcttagttcaaagactccaaggtaggagggttcagagttcaaggccagtctggtgaaaccctgtctccaaaagcaacaacagcaacaaaattgtggaggggaaaacaatcaagcacacagcagagagggaaaacctgccagctcgaccacctcagccagttgatttagggccctatcaattctgatacttcagaatttctgtgtgtgtccttgccatgacaaaaaaatgacattttacctatgctcatgctcctaaagacccacagccccagtctaatcatgaggaaaaaagaaaaatccaactagttttaattgtagggcaaagtacctgaccagcactcaaaagaaaaaaaaaaaatctgtcaaggtcagcagaaatgaggaatgtctgagaaactgtcacagccaggaggaacctcgggtgacttactgaataaatgtaatatagtgtcctagacagggccgggaataggacactaggaaaagccaacggaatctcagtaaagtgtggacattagccaacagtaaagtatgaccagaggctcattaactgttatgttaatatatgttaacattattattattattagcaaatcatgttaatatattaatagaggaaagggatacttggtaaatgggacaatctattgtctttttttttttcaatagaacacaaattgtcctgggtggcttggctgtactctcaacttccagtcaagtcagaaaagatcctgtgctcttcaagcttccagagtactgtcaaactgagcttaaagatttaaaatatttggaaatcattactgacaccatctgaactgaaacgactagtacatggagaacagtcactctgtttgatgtagagctcggttgtatttaagtgtgtaattacccattacccctaacacacccccaatcagtggtgtccaattcctacaattcccctgggatcgcctgcgtgcctctcactcacttcatctcacacatacaacactgttggtgcagtggtagaacacactgttggtgtgttctaccacactctaccaggataagtgcagttgaaagcacatctggggaataaaggctctctgggattccattcaacccacattgactgaccatgaacttagtgcagttgcaaagggcaactgggaagggaacatggtatttaaaaaaacaaaaaaaacaaaaaaaaaaacataaaactttaacacaaagtaagaatctcaacatttagacgagtgagctcaaggtaacaggcataaaagacaagtataattacttctcattactgttgggactgtaacttttaaagctagtttcatggagaaaaatgaactttgaccaagacttgctttgatagtagaggtatataaacaaggtctcaagtggacctcagggaaggatttcagggaagccctagcataaacacatgcagagtaaagtaagggagactcaggggactgaggagtggaggtctctgtagacaaccaggggttagtactgatggaggccacaaagaactcttgatagttttatgagcagttataatttgagggtcaatactattcggaattcttgggttggaccataaataatggattggctgtgacattgtttttctaataggacaaactgttttatgaatcaatccacagcatatctacttacccaaatttaaactatatgaacatgtttacatgcgcacatatatacagcttcctgtgtttctggccttaggtagacaacgtaacccactcattgaccaatggccgaaggtaactattccatgtcaactaatttttatctaagcagttattccaggggcagtaatttgataggtaggatgtcctggggcatggagcaggacatgagaaaatattgggggaactgtctacgtaaacaatgccatttaaaaattcatgatcccaccaagtatggtggtgcgtgcacttgggaggtaggaggaacaagaagatgaaggccagtctcagatacgtaatgagttaagagactaccctgggcaacaggagggcctgcctcaaaacaaaaaccaaaaccatgatcccaagtgagatgtagtggtttattgatgacgttctctacaacaaataggtagaaatgagaacaggcatgcatttgtttgcagttccatcattacacatggaaattccatcaatgcctgctcaaattgaggaactatttctgtgttctttaatatcaaatatcccattcttgtctatcttcacacctcccacaagagaaagtgattctctagttactcaacacccacgtctttcccaaacctgcttgaattaaagcatatagaccatttcttccatggtttcccgctaccatttattcagagccgttcatatcctctacatcacggtactaagcatgaacgctgacttgtgactcaaaggctgccatgacgtcactggggatgaccactaacaaaggattgtttaaagtacacaggaaaaggaagacggtattgcatttcctggtggtgctaagttgcaactagaactgtacacttaaacagatatctcaaccataactgctcgtgaacccctgggctgtaatttatacatttccaaatgccatccttcatcctgggccacacccctgccttcctgagagtaccttctgagcactgccaaggacagtccactcccataaaaaatacctgtccctttctttcgttttcttagcccaagttcagaaaatttattttgttaaaacaatttgatatcttaagcattactgagccaacgggacatcagaataaaagctgtctaaagttaaaggtacagtacattaactaacaaatgatccttagtccttagtaggatggggtaagaggagagttaatccaaactacaacaatcaagtcttcaaaccaccttctgaacggcgcttctgggttgctcctttcatcttttcttgtgacttttagcttccttaaaaaatagtcagtggggaaatcacaggaggcaatgtgctgtgaattcttcaaactatacaaggtatagtctggctaaataacatgtggttgctgtattttttggtagagtgacccatggcaaagcgggctcagttaccccaccagtcaaccccctgggagctataatttcctccatatccatcactgttgtaaaagcctccatagctacctccaccaaaccctctgctgctgccgtggccgcctcctccaccaccactgcgactgttgccagcccggctgctgctgaagctggaactgctggcgccactactttgtcgatagtctctggcaccaaatcctccactgaatctgctcttggaccgtccacgactgccacccttgtaatggtgttcaaaagccatgttttctagccaagatggcacttcttgctttgcttcaacgagaagatccaacaaatctttggtaatatttatgttcctctcattgaagaatgaggtggcaaggccaaggtttccgacacgacctgtacgaccaattcgatgcacatattcttcgatgtcactaggcaagtcaaaattgatgacgtgtttcacgttggaaatatccagtcctcttgccgctacggctgtagccacgagaattggactttttccggatcggaactggtggagggcctcttctctatcgcgctgagatcggtctccgtggatactggtacaggcgtatccctcatggtataagaaatcctccagagaatccgcaccctttttggtctccacaaacaccaggatcagggaatcctttcctgtcgcgttcaggaggtcgagcagaaacgatcgcttgtctgcctcttccacccacacgactttctgcgtgatgttctccgaggtggacccgactcgtcctacggccagaaagatatattcatccaagaaatctcgggccagcatctgtatttccttggggaaagtggcactgaacatcatagtatggcggacacctttcgggggcatggtgtcttgctcaactattcttcgtatctgaggctcgaagcccatgtccaacatccggtccgcttcgtccaacaccaggtacttgcagaagtccagtccgatcttgccgcgctccatcatgtccactagccgccccggggtggccaccaacaagtggcacccgcgttccaagtctcggatctgctggccgatatccgcgcccccgtacaccacgcaggggcggacccgggagcggtacgagaacttgcgggcctcctcgtagatctgcaccgccagctcccgggtcggggccaggaccagggagatgggatactgcttgcggcgcccgtacttgccgttctccttcacggcgcgcagggcctcgccggggccgtccgtgtagatctggctcaggatgggcaggaggaaggcggccgtcttgccggagccggtctgggcgcaggccatcaggtcccgtttctccttgatgatggggatggcgtgcttctgcacgggcgtcgggcgcgtgtagcgggtgagctcgatgttgcccatgatgatctcgcccatctcgacgtcgctgaagctctcgatgtgcggggggcagttgttgcccgtcgcctccaccgggatgtcgtcgtacttctcgaagttgatgcccgtgttgcccccggagaagagctcctgctccaggcgctcgctgggcggcagcggcttggaccagtcgtcttcgtccgccttgctgtcgcaccagcgactgttcccgccgcgctcgaacttgccgaagccgctcctccgcgccgccgccgccgcctccgccgctgccgccgccccgccgccgccgccgctgcctccgccgccgccgcccgccgccgctgccgccgcggccgcccaggccctcgtagtcactccggggcccccggtcggggtcaaacctccccctcgagccgcccccgcggtcgccgccgaagaagctggacttggccctcgcgtcgctgcgggacccgaagctgctgtaggcatccttgtctttaccccaccgtgagccgtccttgtcgtaggacgacgccttggccgccgccgccgccgcccgcctcccggttgcggaggtggggagggatgtagcgcccctgctggcccggccgccgccgcgccgccgccgcctcctcctccgccgccgcctcctcctccgccgccgcgcctccgcgcctccgccgcccgccgccggctccggcgccgccctggccgtccgcgggagagctcagctccaggccagccaactgctgctccagccccagctcgtcctcctccgccacatgactcatccctgaaggctgcggggaaccggggccggcctcggccgagcgacgggcgccctcgctccgctcgcggggagaacggcgagcctgggacggcgagctcggccccccgaagacggctgcgctcgctcgcaccgctccgcccgcctctgaaccctaacgctgtggctccgccccgccccgacgccgacgccgcccccgcccgccccgccccgacgccgacgccgccccccgccccgcccgccccgcccgccgccgccgccgcccgcccgccgattcccgctctcgcgagacttcctcgtcaggcccgccgcgccatggccgaccatgtgctcgcagggctcccgcctcgcgacgccctctccgacgcacgggccagcgcacgctcgccgcttcgcgcgccgccgccgccggcctggggcccgcacgacgtcgacggccgctccccccacccccggctccgcgtgacccccctcacaacacacctccctcccggccccggcggcgccgccgaggccccggccccgggcgtcctcaagatctcgcgagaactcgggcccctggcagtgaggctcggaggctcgctgtaggcctcgggcgcccgcttgctcgctgtcggctgcggggttcggggttcggggtctaggggtttggttgttgtgattttgtggctgtgcccttccgcgccgcccttgcctcggcctcggcgctgcgggcggcgggcgcgggcggggggcgggcttgtgcggctgaaggaggcccggctcgccggctcgcccggggtcaggggaggaggaggtggaggaggggggcggccggtcacgtggccgcggctgccccgcgggcggccatgttgtgctgccccaggaaacggttgctcgcacccagggttctgaatgggggcggggaagcgggaagggcggttggtggccagggtggggttgggggaggtaaagcagggtcgacagtggccttccccgagggccagctaagggccaaatgctcgcacctgctcgcccggaggagggtggggtgacccagaactgcccagccatcatccgggtggtggggtgatcccagaattgcccagccatcacccgggtgatggatggggtgaccccagaattgcccagccatcacctgggtgatggatggggtgaccccagaactgtccagccacgacccgggtggtggtgatggggtgaccccagaattgtccagccacgacccgggtgatggggtgaccccagaactgcgcagctatgacccgagtggtggtggtggggtgaccccaaaattgcccagccacaacctggaggcctgggaaaggatggaggcctcctggtggtagcactagttataagtgacagggaagctggctgccctgggtcgccagagatgagcagcccgctctgcatctccctgaggtgggggtggagggaccctagaatgctcctgctccacataaacgagacaccccgtgggcatcctgcttggtgtggggcaaggggagagggctcgtgtcttaataaataactggaaaattgtttgggtaaatagtgcttacagatgtggatttgatcatggattcctttgcgggtctaaggaagggttttgtttgaaacgtgtgctactactttttgtggaaaactttaagaacttgaaggatctcttagcagtagagcacttgcagctcttgctgaagaggggagttagttttccagcgcccacatcttatggctcacaacagctgttaactttagttccagggggatccgatgctccctcctggcatccatgagctcctatgtccaaacagtgcacatacaaacttaataataataaaaaaagggcacaagacatttacacatgagttttaattgttttgacaactgcaacagaaaagctcattattggtttgtttcttcattagactttggacatcttgcttcttccctatataaaggtgttaacttaaaatagtgctcatttttccacagaagctttaggatttaggcaaaaattagtgactgtgaaaatatattaaactttgtgtgggatgcagatgagagtggatgagagtgttattgtttgttttaagaattttaaccccacattggacaattgaagatgaagtcagtacacccaggaaagcagagatcaaaagcttagacaaaaaaagtgattccttgacaggcagtggtggagcacacctttaatcccagcactcgggaagcagaggcaggcagatctctgtgagtttgaggccagcttggtctataagagctatctaggacaggatccaaagctacacagagaaaccctgtctggaaaaagaaaaaaaagattcctcgatcccattaagattaaggtcagtctaacctttggacctctgaactacatgaactgttaggtcctcgtgtatctctaggtcattttaagctgctggattttgaaagttactacgaacagagagaactgacaccagcatggactactgaatcaccaaaccagatttagtgtttttcagcgtgtgaaggaaatggtaacaactaaacgttgggcatgcttacagtaactctgaccttcactagtcaaagtgctttctgtccacccttcctgatttccctaggatcctgattatgtcattgtcagggatttggttaaatattttgccttgcgttactccaaatcaaattttaaagaattcttcctccaaataagctaggggcttcctgttagcagtgttgggttccaggtaggtaactttccagatcagctctcaagaattccatgctttgctcttcctctccctttgaacatgaggtgacggtggcatttctgtcactaggctgtaaaacaccacgaattctgtcttgctggactctagctccacaacataagaaaaacccaagatagaaaatacaatctgaacagaggcataaaaacacgtcatgttctgaattctaaacagaaatagcagtaacaagaatgcctgtctggctttccttcaactcaatctacaaatgaaaatactcctgccataagccaggagctccaacataacattttattggttctctgggaatttcacgtcatgcaccctgatcatacttcccagttcttccatcacccttgtgaacccctcccccgaaaaataaggaaaaataagggaaaaagtccaattcgtgttatctacatactcactggtatgtagataccaccagaggtcatcagttgtggagctctatgcttcagcatccccgtcacaattttcttttttgtttttcaagagagggtttctctgtgtaactttggagcctgtcctggaactcgatctgtagcccagagtggccttgaacttacagagatccccctgcctctgcttcccgagtgctgagataaaggagtgtgccaccactgcccagcccatcatacttttaagagttctcattagttgcgcaggtagtggtgcacacctttagtcccagcactcgggaggcagaggcagggggaatctctgggagttcaagaccagcctggtctacaagagctagttccaggacagcctcgaaagccacaaagagaccctgtctcgaaacacccttcccccaaccccacccccccaaaaagatcctctgtaggacagaccaagtacaaagcacacacctggcctgtgtttactgtctgcttcatatatttgcctgtctggaccacgcccacccacaaagcactctggccctacatttggctctctctcaacttctaagctgaacttctgaaagagtttaaaggggagatgctctgacaaggagatttgcttgtctccaagcccggctgtgccttgccttaattaaaaatggtattgatttttctctgcttagtgatgggcactgggctgcctcctgatgttcaccactgacagcttaagtatgaaacaaagggcacttattcagcacttaacgcaaaattatgactgattaaaaagtgatttatcattaggactacatctgtagtgcatatgagagatgcttactgtacccagagtttggaaggcacagcaggatgacagaacaattctctccttttctaatccagttctcgtcattcacctcttcttcccttgtttccacacaaaacgaaaagcacagtttccactgaattcagcaccacaaaacccaggaagagacttagacttactgaagtcactctttcagcatccccgaaattgtctatcattgggctccctgaggacttcgggaaggaaacagccgtcgtcttcccagaactctactttcccgatgcctgctctgctgtcctgccacttcactggtggtcaataccagggacccagcaccctggatgaaaacgcaggactaaaaggtttaggaagaggaagccaagctgcctcatacggtcagcttcctttaaggaaaaacaaagcaaaagaagccctatatgcagctgtgtcgttttcacagaaaatcaatttctgtgattcatgatataaaagggacctaagtgactggtttgaacataagaccatctcatgactccttaaaaacttattccacgaacagctagttccatatgccaggaactaactgctcaagcctttcagtagagtagtgagacaaacgcatacacacattgcagtattgtctccctccctgaaacaacaaagtcactgctaatggggcttgcattctacccatgtggatcaaacatgtatggaaaaaattcgagtagggatatgtcttagccattttaatccaggaaataggagctgttgatgtcttattgggtaaatcattaaaaataatcaatatactcagaatttcataaggaccaaaaggacttgataaaattttctgtgtaagcaagctgacaagaaagccttcatggagactgcctctgttgtgtaggctaccagattgctccgtagcctaaagattccaagcagccacgctgttactacctacaacagtctgaagagaatctgtggaggcctgtgtataatcaatcagctttcctcattttacaagcccaaccccatgatttcaattttggtacttaatacccctaagccctggtttccttatccattgaatgggttatttcatacagatttaggtaaacattaaatatgtatttcatatagaggcaaacattcaaaacacaagctgattctgtagcacacacaaaaacaccataagcaaaatattttctgacatttgttactatggttatttgaatggtccccatagactaatgtgtttaaatgcttggctgatagggagtggcactattaggaagtgtatccttgtaggagtgggtgtgtccttgttggaggaagtgagtcactgtggaggtgggttttgaggtctgacatatgctcaagacacatgcactgtgatagttcacttcctattgtctgcagacctcagttcctccagcaccatgtctgcctgtgtgctgccatgcttctctctgtgacaataatggactaatcctctgaaactgtaagccagccacaattcaattttttcctttataagagttgccatggtcatggtgtctcttcccagcaacagaaaccctaagacagtcccgcaccacacacggttcttagtagccataaatgctatcaaattgcagtgtgtacctcagaaaatgttttcatgagatgaaaagtctattgacacagcaaccaattaagatttccatagtcacaccaactttttctgtgaccatcaccctctggcatgacaaccttccaccagcaaataaaagcagcatctgttggctcatacaattgttagcacactcttattactgaagtatttctaattcttaaattttgtatgatgttttttgtgtgttcatgcatttgtgtgtgcttgtgtgtgtacgtgcagccgggaccatgtatttgtgcaacaggattggagtcagttctctccttctactaatgagggtcctgggatggagatgagggaccaggcctgtggccttacatgaaaagacatcttgctgggccctagtgcaatgtttgaaaatagaggtataatattaaactgaacacaacagatgcatgcacacacagaacactgatttactgaaatgttcactttattacagttgtatgaagtatgttttctccttcatccaagaatttgagtgttcataatagacagcagcccaaaataggcactagaggatgctagatgaaagagatgccctctacaagtctctttgatgttatagatgtgctttgtggaaattcaaagcattagcttggcaaacacatgatggaaggacagacgtcctccctttttttcttgatgtgtcactgtttcagttctgaaaaacacttgcttgatttagaaccttccatcatggcacagctagcccaacccttccttctcctcattgtgtctctcttctctttctttccttcctccctttcttgtgtctttttttctggaggaacgtcccagccagcccgcatgtatacgcccacccctctggtggaacccagtccctaaacggctgatggtatccatctgccatgcagtagtgagcatctccttcctttcagtcactctcaggcttttagaatgatcaacaagcagctccacctcctaccttagaaacagaagctcattccttcaccattctgaagtcgccctccacttccactgctcttttgagacaactgtcatcacggaacatttttgtcatataattcaaaatctcaagcacgatctcagaatagtcgtggtggtggacaccacattctttttcttgaaatgtccccttatctatcctctatgctgtatcaatccttgtcctgtcctttacattttttctttcttagtttcttatcctctttttctaatcttaaattctgccgagtgatcgtcttaccctcttacatggagattttaaaagctcactgaattcacatttagtcttttagactgtcattcaaagcttcccaaagatcatccccagggtttaaagtctagtggatattggtctagttggtggaaggcatggagacttgtgtatgtcatagtgagagatgcaagccttgaggtggccatggagtaggaagaggatggagccggagctttactgctgagactcagggggccgggcacaaatatcatggagcctgactaaccttgtatggtcatttatagctccacaaacattcatcatcagtcatgttctccaataaagactgatgagaaatagatctgtgagaccgtgagcagatggaaagttcagcagagagaagtggggtgagtcacaaggtgtcacctttataactaacaagaagtggaatcccttgggatgggctgatgtgaatctagagagacttcttccaccacgtgtaagtgtaaagcacaattacatgccaaagaaaatccccatgcagagtaacgtttctagttttcacgaataatcgttcatagtctctttccaagatgtacaactcatacaactgacctggagctagccattgattcctgacgccacagcttgctactccttggttcactttagattttttctttagtcctgaaaactttgtaacatgacaaacactgggaaacattctaagcatattactaatacagaggtttggaaccatcttggcaaacttatgaggtaagtgctaagaacagatctcctagctatgtaaacctaggcagggtgaatccatactcctaatcacattgcttctcagctagatctcatgtgttcttcaagactcaggtgtcattcctctctctctctctctctctctctctctctctctctctctctctctctcgcacgcgcgcacacacacacacaccacatgaatataggctaagttgtatgcattcctcaagacgactcatttctctcttcacacatatacatataacatatgtgtgtgtagatacatacatacacatcaaatatattatcatagatattaagtatatttattttatatgcattggtgttcggcctgcatgtacgtctgtgtgatatcacacattggtgtcagatcttggagtaacagatggttgtgagctgccctgtgggtgctgggaattgaatctggggcctctggaagagcagtcggtgctcttaattgctgagccatctctccaaccccctcaagtggcatcacagtgttcccatcatgtacctactgtgtccctactgtcgccggagaccacagatcagtgaagcatttccactggctcacaatgggagctcagcaagtgttgtggaattgagacatattcaaataaatggaaatgatttattcaagtgtgacagttgggaagaaaaaccaatggacaaatcgaataaccctgtcagctcacagtcttcaaatttccatttgctcatgactcatacaataaatcactaggtgggggcctgaggagcacagtggtcagaaagaagggtgataggtttgtggcatgcattgggggtactaagccagtggcttcactctcttccctctaaaagggacagaacccaggaccggggctggccttttcacaaacctccccatcagggtaccagaaaatggtggtgattcctcaggccgccaaagcctttccttggccttctgtgccattgctttctgtcaagaccaggtctcttgggggtggtccctcatatatctgtggtagcttcccccacaccctatgttacattggggtgtctttgagtgggaaaccctcaggttcctattggaccctgtcagctgggcttcagttctttgacattccctggaagtttcccttccccagccttggtatctgcttatggactctgcttttgcatctgactgggagagaccaggagtggccagagaggcttgctgtgtcacagtgagcagccaggagggcatctggaggaaagaagatcccatgggggtggggtggaggggtgatctgagccaagagaaagttccctgggctgggacagcagcaagaaacaaaaccaaggagcctcccttcctctctgagcgcctctaatgacctgcggggaaaccgcacagcagtcatttcgcagatccgatggcaggtcactgcgacagatgttcccagcatatgtacagaattaattacccactagtaaaccaagtctgcgatgcgaagagtcattttgtccgcatttcataacgattttgctgttattggaagcttagcttttcttggtcatctagatctcctcggattaaagcttttctcagtgggctatgaggaagggtccagagagagataagggcatgggctgcaaggaaagaggatgtggaggggaggaggaagcgctcagtgctcagcacagagggaccacagagtcacccatccagctgatggctgtctgtgcaatgaagagtgattggcaaattgtctgattcaaacattggatgctcgtcatattttttaatttttaaaaatattcttagcggttaccttctatttaacagcgctaacacttaatttcaccccgtgctggggaacagctgcagtgtctaaaaggccataacaacattcggagaatcaatttccaaaaaggacctctcttgaatggctttaaggttctgaacgtaatatttccatctgaggttgtagaagaaattttgatgtccatcaattaaaaaaaattaaaaggcctcttgatttttttcctaaggtaattatttccttggttattttcactgatggcctacagctttaaaatgcactaaatccctaaacaaacaaaaatatacctgaaatctatgatgttttgtccctttgagagttcctgactcctccaaatcctaatttcataactcttattcagatctcttgtgtaacaaagtataacaaaaaaattctaatccatccatttctttgagagcaatgtctgtgtctgcatacccttgttttctcatccatccacttcctcattcattcactgtgtcagtcattcaacaatgtctgtgcttggtgctggaggaatctaggccactcagaggtctgtgatttgtaggattggctccaaggctgatcactaaggctagaagaccctcccacccttccccctcccccacctcacacccccccccccgtctgctcctagaaacccaggccttttcaaaaccacgagttctgtttatttcccatccagtagggcttgacttttttctggcagtgtgccagggagaactgggtcagaggtttttctggaatgttcttgagctgcttcaagaatggggtagaactagggacccagtatttcttactctagtcatccatttcctgtcctttcctccttcaaactcaacccatcataagaaataaatgcaaaatgacttttgtttggttggttggttggttagtttggttttcaatacagggtctctgtgtgtagccctggctgtcctggagcttgctctgtagatgggattggcctccccagaactcaggtgtctgtctctgcctccccagtgctaggaatcaagggtatgtgctaccatgcccagtttcatccaagcgtgactgttagtgtcactttgggatgcattggtgcagcaagccaccagagtctgacagtggaaattctttgggtaaaagttacttttcctcacattccaaggaactccaaatttatgcttcaattctccaaaagttgagaggcagattaggaaccacagtgcatggtgttttgttgcttctgtcagcttccttacttagaacatcagatacctaataactatttcaccgggtggcacctcagctctgtatcctagcttgttgatgaggcatgacacctgtctttgccatcatatatggagttttggtgccattgatgactatgaactgtagtctacagactggggagatggatcagtgattaagttcttgctttacaagcacaagaacctgagttcaaaaccctagcacccatatagaaaaccggggacaattgtgcatgcctataacccaatgctgtaaagggtgaagacagaaggatcccgggacctgttggctgctagcataggtccaggttcagtgaagagaacctgcctcagggatataaggcaggataccaggcatcaactgtatccggacctccccccatctctctctctctctctctctctctctctctctctctctctctctctctctctcctctgtctcacacacacacacacacacacacacacacacacacacacacacaaacacacacaaacacaacacacatagcacatgctcacataaacacacacatacacatacagaaacacatacagaaacacacaacacacacaccacacacacaccacacacacaaacaccacacacacacacacacacacacacacacacacacacacacacacgcacgcacgcacgcacacgcatactcaaaagtttaaaagcatactcattttcattatggtattgatgagagaatggctgtggttcttcctcgcagatggtcctaagtaaacactaaccctgaggggtcagagaagagacacttatgaacttatacaattcactttgagatttatataacaaagcttcaccataagggagcaggagagtccagatacatttttgtccccttgagatccagtcttctggcattttcccactattctgtctttgacccttctttcatgggtaaaatgatagcaaccgaatgtggtttgtatgtttttctgcttctgaatctccattccattgtgtttccattctagggcttatccataattcaaccctacttgaacatgctagtatggcacaatatgtcgaatagttagaagcaggtcaaagcagacctagttcaagagaactggggagtcctcagcagtggtaatttattattccttgcaacaaatgattaaaccaattctctgattaatcaaaactgtactttggaactagccgcatgagaccagaattttaaatcatgttatgcagactgtggcgatataaagaacaagattgaaaaattaattctataagaaatatttagcaaataagcattaatcttttcccagactccacaaaagagtaaagctactctcaagtgcattctgtaaaatgtgtcttgtcaagcacccaggaggaaaatgccagtttttgagtaggtacactgtgcatggtacaccatgcctccatgaaggacatttggcactgttaatgacattcagggttcaaaaccctcatctccttttcttatgactcttcgtgttcccaccccactccatgctaaagaaaaggactcaattaccacttcccattgctacctccacaagcataactcaggagaagtggtacatacttataccatatacatattaggaaatgtgccattttcttctgctttggtacccacacatgcctggtaaacacacatgcacacacatgcacacacacacacacacacacacacagagagagagagagagagagagagagagagagagacagagagagacagagagagacagagagagacagacagacagatagacagacagagagacagacaaagagacagacagacacagagagagagagagtacaaaagtaaacaagacagaaaacactgttacattggtggtaatgtgggtaagttgatggagagctactccacctacaatataacatatgccacataatagtgtggtatataaggataatatatgtcaacacatgatgctgttatgcaagaataggaacattactatcatattatcctggaatacaaaaggaaaagagtgccaaaatgcatctcatcatgctatacaagaacacaaagcattagcatcatgtcttatgcattagtgttctaagctgtgaaagcaaatggagctctattggttctgtagaactatatatttactgcaagttataaagaagaattacaacagtaagtgcctaatcagagtggaggaaacatgaaacccaggagcatgaagtcctgagtgatgtgtgctgttgacatgaggatggtcacatcaaggaccccagcctcagacacatgggaaaatggcaacccccttactccctgacccacgagtctcagagggatgatgtcaaagccttctttggtgttcatttgcagtaaatgtatcccatcccatggcttcctcctcctggaggtttacagcctaaagactcctcccctactgatactgataagcctgtcccattgatctagctgacaccataaacccgacttcctgttcaccatatggaacagacccatctgtctgttcagctgtatataataaacagctgtgcttccgggctactgcagtgtctccgtcagagagtccagcttacccgatcccagcttttctgtaagtccatgttgtaacaataagtctttccaccactgccacctgaaccctgccaccatgtgggcactttctgccaggccacccaagttcttcctgctgccacgttagggccccaagtaacacacagagatttatattagatacaaattctgcttggccaaagactaggatttctcatctgctagcttagtcttaagtatcagccataaagacttatcttattggatgccttctggtgccctctcttgcagggggatcacataatgactccatagcagagaccaggaggaagagcgaaaggggatgacttccttcttgtccttgcttatatatgagtctccctgctatgtcacttcctgcctggatcacaacacttctttactacatttcccagaatcctacttgactcctagtcctgcctaacttgctgcctcattggtcaaacagtactttatttatcatccaataagacaaacacatacacagaagcacttcccccatcaccatgtggttgtgcttgtcctttcttcattcctagttgtccctagttaggttaagtccttgaagccatgcaagaacacagcacctgataggccattgtatcttattccctgccaaccccagctgtcttttccagcagatacacagacagtaagatttttcactctcgaaatcttaccaattctggtaggcttcttacccaagatcacaatgtctgaatttcactactttgacctaacctgcttgctttacctggtctctttaccaggttcccacagagcatgctctggtttttagttctccagttccatccagtctccgtgttcagccctactgtggttatcagatgctagttcaacccctctattcaccagcactatagatttcaactttgtgaccacagtgccagccataaactcagagtcacccaacactaaatttcttgaccttctttcaagattgattgcactgtacaggtcaagttccctttggctgaggtcttcatgaacaggctgctgggtcctcgagggggcccccttgtctccagctcaccccggaataccaggcctgtcctcccatgttggctactgttccctcgtcattactttggaactttattctgcctcttaaaatgtccaaataaggaccccaaggtcaaggtcattatagactttcctcagtcccatctcctcccattttttccatgcatttttggggatcagatactcttgcttgtgggagataatccatgcaaacttgttctcctcaagattaagattcctcctctctcttaagaaactatcccaccaaggattctaacttcttgtctctcagttctctttttctttcccgaccttgaccttaaacatgcaggataaagaagaatgaccatgagaggttgtcccttaatttttgaaagcacagttaagtacatagttacagtcattaacggtaggtatgcagattgttggatgattcttttattttctttggtttctgcggtaatttaaacatttacttttctttattaatgaagcatttataccaggggaccaatttaaaacagttccattttgctctgggtgctaaacaatgacctagatatttcagagagtggaatctgtgatcacaggcaaccacctttcatttgcttcatgtttaaatgtgccctgcactgttgcttatttcaaggcataaataaacatgttatagacctgtaattatggtaaattataaagtggccaagaggagacttctatgattggcaattaagaatcctgggcattgaaagtaattcagtttaattccctaaactgaacagacctacttcctaacaaaattaaaatttaaaacattaaaaggcatttataaaaattatgaacaaaacttgaaggaaattaatttacctgtaattatattagcaataatcacttgatgttccaagcacaaccaaattcatgttccattaatgaaatgagtgtctcccctgtccctctagcttatgttttatttttggtggttatagggacttaaaccaagggcatcaaacatgttaggcaagtgctctgtcactgacatgtatcctcagcctcttcattctgtttgaaagatgaaatacacatttagaatggcatattcattataaaaaccatcctcaattcatgatgttgattattttcaattcaattcaaataaatgactagatgagtctaaccaattaaataccaagaatacacaggcacaagatgaccatcccctcctaaaatacatacagagtaacttcttttcagtcttaaagtcatttatttacaaatttttgtttcttggtttttgtttttggtgagagttctttttctgaacaaaatgcagtcccgagtcttaactgaagagccttgcactgggatgggaattcctcactttggtgacctgttctgctattttaatcatggttttctatgatttttttccaatatactcagggtttgtttttcttccagacaattgtgcagtatgctgagtcctaagaagcaattgaggcgttcataccatgctcacaaagtcagaattcatgtaccatgttcctccagactcagtaggcttgcctgatggtcaaccaataaggtcttctttgataaacacataatatattatattgagtattgcccccctggtgaagaagagacttgaagaaacaatggccccagccatgaggtataggacacacccatattacctggacggagaagctgcccctgagctttgtatagttccagtcctcagctgcctgcctttggtgagccataactttctacattctgtcactgctctgaagtagcatttaattctccttgcattgttaatgaagaaagttctggagcttaggtatgaagaaactgagactccagggtaaactgtttgtccaagttgaaatatctaacatgaaactgaattacatatcaagatctgcccccaatagtcctgtctcccccaaaataatacaatgctgtggtaaacgccaggtgagtggaacagccaccacctcacttagaccagcgatatcaggaaggcagaatgatgtgcacagagctctccagcagtcttgagatagtttccttggggtggggagatggattcctgccttgcaagcacaaagactgagcaggatccccagaacccacattttaaaaggcaggcagggccagcaagacagttctgtgggaaaaataactgccaccaagcctgacctcataagtttgatccctgggccctacgtaataaaaggaaagaatctgtttgcaaaagttgtcacttcatatgtgaccatgggactccctccatccaaaagtctagcacaattctataaacttgtaattccagaactgagaaggtggggaaagaaggacacatgggaattccagccagtgactctagtctacatggccagttacagttagagaccttgtctcaaataataagatggatggctcctgaggaacaacacctgagagtttcctctgaactccacatgcatgcatacccatacagatctacacacacacacacacacacacacacacacacacacacacggtgcaggacaggagggagagagagagagagagagagagagagagagagagagagagagagagagagagagagagagagagagaggatagtctttttaagaaggtctttctccagaactaggattatgtgttggccaaccccaacatccaccctatctgtcatccgctggagcatgggcgtgggcgtgggcgtgggggtggggatgggggggttgtaagtcctgtggacccagggtttcagaatatccatgacacagggaagccaagagatgtccaggaagagtcccagtgaggacccagggtcgatggtgcagttgagaccaggggcccaccagaccatgattctttgcgatgaatgcctgcctgtaaaaaggtatggctaggggggcttcctgcatggctcactgtgtcacactgcagcttccaccaggagattgccccctgttttatgctccctcttgttctcttagggtttattttgttttatttagggtggggagggaggtgagtggggtcaggaggcaagatgtaaaagacacaaagagataaataaataaataaataaataaataaataaataaataaataaatacttaggtcttcctttgatgatcagcctgtgagtgggtctgttttctcttagcgtcctgcaactcctgtagacctgggactggagatttgccattctgatatgtcaaagcaagctcatggtgtacccagagcctccatgcttgaagcttttacaagttttaaacttgttcaaatattgttaaaataaaaggccaagaaagtgttattaacattctatagtcattcaggagacaacagatttgattgtattccggaggggaaaagtgataaacaaggaaaaatagtagtgttttccccactgactcttaacttattttgcctgagaacctattgacttaacctgcaatgattttgtggagcaagtaaatagattactgtcactgtgaacagtttagacgagcaacgtttgttcttgcagtaaaaattgttggctaacatgcctgaaacatcagcagcccacctttttcattcaccaagggaactcccactgagcagccaccagaccaggatggcttaatctagtaacacccttcatataaccttgccacttagcacccaagctccaagctcccagtgaatgtcgggatggccctatacaagcttcttgattctagagccactgttaatgttaccagcccttacatcagaagctgcaagctggcagtgaaggggtgctgctccatccttatctaacacaccccatctccccatcattccaacagtgtctgaggaaggttgttgggtgcctgaggttcagtcttcctgagtatgtacttcaggtgtgcttattagtctgtgccaggagcatgaagcatgaagggtctaagagtcaaatgtcaagcatgagggctggagaaaaaaacaagccaggcagcacagtacattcttggaatcccagcgataaggagtgttgctggtttttcttgtcctgccaggtcccgccacccttcagccacaaatgaacacacagagatgctatattaattataaaactgttggctgatggctaaggcttcttattggctagctctgtcttaattattagcccatttctattaatctatgtatggccacaaggctgtggcttacctgtaatccagcatgttactcctttggcagcatgcatctcttcagtctccctctgcctacctttcccagaattctccttgtctcctagtcccgcctatcttcctgccttcgttggccaaacagtgttttattcatcaaccaataagagacacatatatgcagaaggacctcccccatcacaggaggattgattggcagtttaaggtcagcatggtctatgtagtgaaatgatatgaggggtggagcagggtggaggaggaaaagcagagaagaaacagagggtgaaatcaggaactgcaaagttatcacccaagacacagagaagtcggaatctggttgtgcaaaggaattccctggggaacccccaaaagcgtgtctgcacaattataatgtgagcacaatttgcattctacagatcttaagcttgaacttggctcatgtcccaccatggtgtttccacattcaggggctcagaactcaagccttctcctggaagatatcttcgtcaagctgccctgctgcttctggcctgagggaaacatgcaagtaagtcttattccaaggtgcttggaccagcccagacccataatggagagtgactgtgcaagctcctggggaagaaaaggaaagagtctttccccaagccattagcactcaagattctcaggcagtttgaaaactcactcctgagcacatgttgggataatgtttggggacacagtgctgcctggacacttacgtgggagactggagcagccacatttaggctcttttcctcccagctccagagttgggtctggggctgagctctccatccctggttcattggcagctttcagtttgcatcctggcctgcacaacgactctcagttctgcagaggatggctcattggcattgtccaattacttaaaaattcttcaaaacctttcttcagaaaagtgctatgggtcttgtgttttattatctataatatgcagaccctctattgtgctgagccagggggcagaaatgaaaacattccatcatcttcaggtctgtagaaacccctttccaagagagatgtaaccatggttcattctcacacaggccttggctctgtctgtcctgaacacatagccaggtttattccagaagtccctttttgtgtagaggaagaatgaaataaccaggattaaaatgttctagaacatatcttggagtacaggacatctactctgaaaagtttatctctaggcaggtgattctaactcctactatcatggggtgtcagctgtgaggtaaatacccagactttagtgagacccaattggtaagaggcccaggaaataaagattccgatctggtaaggattcatggtcactggtagtttttattgattatcacctgctcgacacgtaaaactaggaaaaactgacagaaacatcatcttcaattgcatatttcatgaattcatgcaagaccatactatggaaatagatatgacggcagaggaactagctgaggtcgcagcattaactaaaacagtcagggagatgagtaccacacttaaactttaattcattccctacctatagtcgaggcctgcataccatggaacctcagtaaaagacaatgcaaaattacaccaaatcagcgtggcctgaatgtaaacataaatcagtacagtactgtgagaatgaccttgtcatgctctgctacccattgactatcaaaatgtagtcagttcttctactataacgtaacaaagcttcagtttgaaaggcgatgtacctgctcctttcctgacctgtgatcattcgcctcatggaaacagggaagacaagtttgttttgactcatgtgacttgtgacgaggaagacacggtgaagccttgaatcgtatcaggaatatgtggtagagttcttcatgcagactagaccaaggaacagagggataggaccagaccaagagggtccctcttgaagggtcccccacaggcctaccacaccaagtaggccacaaacctaaaggtcccacaacttcccgtaacaggactaccggcttcggaccaagctcaaacgtacaaggctgtggtggggtgatgcaaattccagccacaaaaggaacagacccagaaagtgcttttaaaggctgtcatataggctagacatatagcccagtggtgaggaggctgccttgcacatccaatatttggaaaaactagttttcaaatataattttctttgcactcagcaactgtgtcggttattcttccattgctgtgataaaacagtgtgacccatgtttaggaaaagtttatttgggcttgtggttcaaggggctatccctgtcatggagaaacagcaggcaaagcagctggaacccaaacctaagcactcctatcttgaactacaagcacacagcagagaaaacaatacactgggaatgtcaccagtctttaaagtctcaacggccacccccagtggtgacatacatactccagcaaggctgtgtattaagtataaactgtttggtcaatggctcaggcttcttattggctagctctctcttaattattaacccatttctattcatcttaagtatttccacgtggtcttatcttaccagagaagggtctggatctgttaccctttccccggctacatggtgtctctctagtggcttctctccacatcctctccccagcattcttctcatctggtagtctctcccgtctatacttcctgcctggctactgaccaatcagtgtttcattcatcagccagtaagagaaacacatatacagaaggacattccccatcaaggctgcatctcccaaacctccccaaaaatcatctccatctggggaccaaatgttccaatgcctgggactatctgggtcatttcattccaacctcacagtgaccagtttcaatagtgtgtcctgaagagcaaataaaggcttgaaggattcaaacacccacctacaggacagggacactgcagttcccactgccctgatttctcatcagacaaaatctacattgacctgctagtgggagtccaagttagtagacttgacaaaaaaaaaaaaaaacaacttgtagaacaaatactaaagatacagacacacaaaatagatgagatattgtagatctttgcttactgctttggtatagagtcaaaaaacaagttgaagtcagaatacttgtatttctgtttaaaaaatcccaggactcaccaccaaagcatatgctttaaatgtggaggtcacataaatgttacttttgtatctcaagcagcaattctttttcatcaccaccttcaaaataggattccaaataacaaggctcccgcccatgctagggccttcggaggctttgttcaattaggtcagaccaggatagactgtttttagatttgttttatgtatgtgagtctttgtctgcctgtgtgtgcaccatgtgcattcggtcctgcagaaggagtcagctcctggggaactggaggtggccaccgatgattgtgagctaccatgtgggtgctgggaactgaacctggtcctctgcagaaacagtggacgctcttaaccgtaccatctctccagcctccagggtagacaactttagcccagttggttcagactattccatgtaaaccttcaacacttatttgcctccatgaagaaggagaggaaaagcaagtcagtctgtctccatattccctcctgaagtccacatgtgaaccatagtttcaacagttccatagtaaacacaaacatcaaatgtacacaaacatcaaatgtcacgacaaccatgcctttggattttcttcctttctgcttcttttctgggtttaggcagcaaaacacttcctgctgaaatgggaaaaatgcagttttaaaaagaatataggtcaaggcattaatataaacttgatcacctcctctttactctctaacatcccccacaataaatcagccttttccccttcacccctcctcatgcaagcctcaccctcccatgctgatttcggatctcggaatgtaaatctgtgacaagggcatctatatataatattaatagtgccaaggagggctggtgtgaagtgtgtgagcttgccaagaaacgagagatctgagccctagtgttcatccttggcggcgaacattacatcttcagcaagacaaatgtaccatcattagggggtgggaaaaaaaaagagagaaagaaagagataaaagaaagggggaggggctagggaagtagccatcttgcaaggaaatggctaagatgcaggttccaatcaatcttactaagccaggtcccctgagatactgtcagcctcttcgggcaaaacagattgctggggagacctcttggcatcaagcaagccagcccacaaacaaaccccagagaagcaagtggaaaagaccagggatttgcacaactagcagctgatatgttaccttcttgcacttctttctttgcttaggagagagaaagcaacttcacctgaagcacagagaggagcccagggaagtgctacaggacagttttattacaaaccactcacgttacctgtgggcacagaaacagggcagaggatgttcctccaggtgtgtttaaatgcacaaggagacagtctgaagcttgatgtttcctaaaggtcaaataccagctgccgagtctgcagactgggagaatatctagttcctttgcgtttttcttttctttccttttctcctccctttgctgctagagtctaaaattttgtctccttctccctcttctatctcactctgtctgtctttaaaaatgcctgttactgaagaaaacacggcaccaattttctgaggttttctgtcttaccagcagctctggtcagttcctcacactggcaagatggggtttgggggagcctccaatccatgttagacagtttctggaaaatccccttggtctattttgctaatttcctgctttactctgctattagagtaggaatttgggggctactgcctacatcttttatttatttttattaatttattttttttcctttgagttttcatgtcagtcacaggaggcatgaggaaggtgtccagataaagatcttttggctgggcatggtgacacatgcactttggaagattaccctgtttgagaccagtctgaatacatgagaaagatcatgtgtcaaaaagcaaaaaacattgctagcccctcctccatgctcctacatgtaaccccagaaaactcatgggttcaacaaactagacttgggtagttgttatgttgacctgtggttgccttcaatgcttggctatgaatacagactcccctggaaaaaaataaccatgctatatcctagccccttagtgtgatgcccttaggaagtagggttcagatggaattcccaaggagggagactgcagagctcttgcccctcatcatctatgataaagagggaaagcagtattctgccaatcagggagtaggccctcatcaatgtcatgttgccaccctgagtttctcctcaaccatgagaaacaagcatctctccttacaccactcagactgtgaggttgtttcagtagtctgaattgttgaggttcttgggaaaatgaaattcaccttttccttaattgtttaagcgggataaatggaacccaagctccatcccctgtgatctcatttggtcactccttattctgtgtatcttctaaacagatgccaaatgcacacagagagctggccagtggcaagtggcacttggtggctttttctcttacaagtttttaaggtttactttggaggattcctgagtcctgttgccaaaagtaaaactaagtctgaaactggccttacagcccagagttgtagccctgagaaggtttactccacaccaccattttcaactactcctgataaataaactcgatgtgagtcatgctcagaataaccctggatattagagcccagcttctctctctgaccaccaatgtatttttgaagcttgtttgaaaatagttcaaagtaaaagaaattaggcattcatttttttgtaaacgtcttcttgatttattatgaaaagggaaactattgctcctgccaagcctttaattcattggagaagataacatatgggttgcagacttagcttgatgggggaaagaaagacagtactagacgcatgcagactaagcaaacacaagctcacttctaactgcaccagcttcattggttaaggtcttaaaggacttggtcatcagcaccttggcatgtatcttacctgaccctgaagtgccttcttcctattagtggccataggttgtacttcctttagactaaaacatatgaaattatgataactcttatggaaggtaattagaatagcttgttctattaacaataatgtgttgtctgatcccaaatgggatgtcttcatcaaatccttcccctcagggtttagggaaccttgtggaagaggagggagaaagattggaagaggcagaggaaatggaagacaccaagaaagaaagaccctctaaatcaactgagcaaagctcctatgaactacatagattgaggcagcttgcacatgggtctgcaccaggttctcttcacatatatgttataccttcaaatttagtgttttcatgagattctcgagtgtgtgagtcagtgagtctctggtttttgtgccttttcttggggtctttttcttctatttgtttgtcttgtccaactctgatttgttaatttttgttttatcttactttatgttgttatattttattattatcccttagaagcccattcttttcataatgagagacatatagggagtggatccagatgggaaggaaggtggagaagagctgggatgatatagtactgccagcctgaaatcccaggactcaataagtggaacttggagcataacaagttcaaggccattttttgatacctaatgacaaacaacagcaaaccaatgtaaatgtggtttggtttaatttatcttggttgatggctcatctttatgggtcatttctttagattttaaattcgtaggaaattaatttacgtggcagcattgaaaacttctctatagttgtctgtctatgtggaattcatcttctgcattgtggaagtgtcagaaaatatatggtccagcatggttgtctttatgttttcttcccccaaatactgaactgtgatttactcattagatgtatctgacatcttgactaaattcctagctcatcgtaggataagactgtctctcattcatctttctattctgagcactgacacggggctgggcccttaactgagcgctgtgactgtgtgagtcactacctgtctgaaggcttattatttctttgattaacgggaggcctggctgggacgatcagaaaactctgttttgatgcatcatgattgaagacatggcacacacactgcagagttggaatggtggtaggtctttgtaagaaagaaaatcatggcagtataagacaaaacaaatagcacaatgatcagagcgtgtggggagacctggtggtcccagccttggcagaaagacagacttaaaacgaagacctggaactgtgtctccattggtgtgaaacatttccagaatggggaaaagaaagagggtgcttcagcctgcaaaaatagcctggacaaagagaaagtttgtttggagaaaggctgattagctcagagtagctgggctatactctgtaggtgtggtggatgatgaaaatacccctaacattaaaaactggatttgagaggaagggaaggcaagaccaggccatggtgtatgagcatgcaacagtagaggaggtgggatttgagctgaatcttgggaaatgagtaggatttgaggaatgggaagggataaggttgaatttaatactgagcaagtgtatctggtagatatatttaggtcaaggagacaatttgattaaaatgaagcatttgggcgaaaagactgtaacctgacagaagattatgaggaggaagcagcagggtgtactagggactttatctgtttcccgtgtcctgagtggtcttagctgtgcgatcagacaaggtgaaatgctagtgcattggacagacgcctagaaagcacaaagacggcgctggctgaagaagggggaaatatcacaagcccagagtgtgaggtaataaataaatagaaagtaaaccctcgggggtcagcaacaagacggggggatgtgtgaggggaagaaaatataccaaaatgttgtaagaattggcacagttatgtcacttataacacatatgacatgaaaaactatcccatttgtttgggaaagtttcattttgtatgtgtgtttgttcatttgtgttgcactgtacgtatgtatgcctgtgtgcttacgtgtgtgtgtgtgtgtgtgtgtgtgtgtgtgtgtgtgtgtgtgtgtgtgtgtgtgtgagagagagagagagagagagagagagagagagagagagagcgcacaaaggacaacctgaaatgcttttcctcaggcaatgtccaccctgattttgagacagcatttctcacaaggctgcagtttatctattaggctaggctagctgatgagccatctgcaaacctctgtctcttcctgattcctagagatgggatgacaagcacacatcagcatgcccagctcttttatagcttctggtgattgaacctacacttgtgtagcaagcagtttacggacatcccaagcctaaggtactgaatcctatacattcgcagcaaatgaaagaaatatgtttggctgcatatacggtacatttgatcactggccacaaaaatagaaattcagttatctcaaatactaaggagatggctaatatctgctgtgtagatttagctcccgggcaaactaaatttatattctgacttccttaaatctttatccttgttgccttctggacaccacacagctgaacctccagatagtaggctgatatttatttatggcaggaagaaaaaaaatatatcgtttttttgtagggtcttatttaaatcttagtatccagaggattgtcgtgctcgcttctagtactcagggaacctgagcatgtgtaccccaggaatgccacataccaaagtcaggctactgttagcaagaagaaacaggaagatgagtggtttgcaagcagttggacagtcatagcagagtacctatgatagccaagcaagtaaaagttcaagaagtgattgtttccaggtgctaacacatcagttgtcagtgaaaccagatcatccactggcctaggtggtgattcctatgagtttctcacagtgatgctgctcctcccatcttcccagttccatgaaaggcatctctttggctgtgatgagatcagggacaagatggtatcactttgccactatccttctgtttgcttgtgaacaagaagatcttttaattcatttatttttcagatgagtaaggtgtcctgggtgtcagctaagaataaaagaggacttcaacctcttttgtgtgctgtttgtgtaacaaacaatggcccagatgggagcaaaggtttgggccatcactgaagttaagagatggatttacagctggaatttctctagtggtcatgacaaatatttaccagcaagggaagtctcagggtggagcaaacagattctctcttaatgttgattgtgaagtctatgcaaaatgtaggcccggaagaaaaatctccagcgaccttcattgctagaaagtttggctggaaggcaaaggatgagaaaaacagatggaaagtgttaagtgatcactcagcagtcagtcgggcaaagacttctttattcagatacaccagccaagcacaggccaaagcgaggaggagggagctgggaccagggccagcagaaggggaagagggggtccgtgtgtccgtggtgcccttaagaagccttttctatgtcaccttagacttcccctcaccccgccctcacgggtgtgttccggcacatctggggcagggctacagtgtctccctacaattccccttttagtctaaaagaggattaaaacttaatagtgtaaaacatccaaaattaacaatcataaaggtgaaatataagaagatacaataatctgctattgcacatcctaactatgtctattccggctaagccctaaagtcatgtggaaagggtatttaacttgaacacctccttccaatcccaactctaaacaataagaaagttatttctaactaggctttcattaccctaataaacaataatggggaatgggggtgtagcatcttctaagttacttcctgctgaaatgggacctgtggggtcctgtggaaaaaaaatgttagcatagggaaagtctctaatgagttatctccagtccatgttagatgggatttgcttgattgaagaactaggttgaaatcctcaactttattgaagtcagtactcaaggttctggtcagagtgtcagttgaaatggagtgagttgaatccagtgcagtcggagaggtgtggtccaattctttttctggagcatgcagggattgtcattaggcgggtcttcattggctgtatgggactcaaacataagtgtcatcagagaaatgttctcttgcacatgtatgtgtactgggaaaggcaatctttaaaaaatgacaattatgaaagggtataggccttgaaagaaagagccaagaaaagacaaagatagtcctctaattcttcatttattctgtattataacaattggcttcttgatataacacagaaacttaaaattttgttaaataacatgcttggattttaggggaggaaagccaaatccagtcctaaatccagcatcgatttaattgaatagggactaggaaatgaagagaaatagagtcatttgagagacagctgtaaagtttaccgtatggcatgttccttttgtttgatggttatagctaccttctttccttaagtatctattcatgtagtgtcctttgacttctggaggtgggttttcctgtaaggataaaaacaaagcacttcctatcctttgggaggcttttatttagttcatgagatatacctcagtaaatacctgttagtcgtccttgttgagagagagggttgtctttcaactggaatcttgatcagtttttatggtatccaaagattttcttcttctgtggtgttggttacactaattgatgtggaaaggcctgttttcatggttttcagcaccatttcctaggctgggatcctgaactttttaagtggagaaagtgaacagagaatgatctctctgctacttgacctttgacacaatgtgaccaacgccctaagctcctgctgctgtgacttctctgccatgacagacagtaacccttgttcaattgctgctgtcatagtgtttcatagagcaacagaaaagatatgacacagacatgggatggatatacagatgcaagcctgtccatcagccactgtcatccacatacatgggttcatctctgggacagagataggtcactactagaagagcaacttcacacaggactttaatttactgaaggtatatttacagctagataggacctgaatggcaggctcggctaagtgactttcagtactgcttccctgagagctgcgcaccccatctcactgacagtagtagtgccggcccacttggtttggttacatggaaacacatagtgaccactgtaaacagaaactaatatcctacagcactttgccctccatctctagtgggatcatggtgtgctggtttgagacagtaacagtgtggatctataaagaaggcaacatagcacagagacctgacagacgatatctacaatgtgtgattgacatttgtgattgacttcgggcactacagtgggaaaggactgacgtgtgtggcaccttgttatgaaatgtgttgcttgagcactcaggtgtgacactacattagtctattaccttttgtggacaatggcataagactatccaaaaatgcacatcccacaatgtgggcaaggcaattacgtaattttctttatgcaactccaatagaataactcaaaaatctattatgataattagaatttgattaagatatgcttgttaaaaactaggtcatatttttatatcatagatgacaagtcagataacattaaaatgtagttctacttaaaataggaataaagtaattaaaatgttggaaattaataaaaagttagcaagacttagatagctatattaagaaaatcactcatttggcagtcaataaatatatatcaaatgccatgtattcatatgggctctgacaagagtagataaaacactacatttcagaagtttctatcctatttggagatgagagataacaaacaaataaatttgcaagctgatatgttatttttttaaaaagataggaatagatgctgaggagaaagccatggttcagggcacagggaatagtgaagcaggagaggaaagccatcttacccaacgtggccaagtgaagcctcctgagaggctgatgttgaagcagtcttgggaaactgaggcattttctgtgaaattcatcaaaaggtgacaggttccctccaggcacagggaatggcaagcatagggactcttaggatgtgactggtgggttcttcgatcaccaaggatgtcaacataactggaggaaagacaactgagggaaagatggcaggagatggcatctcaagaccaccgagagaaggagatgacggtggagtgttggcatgaacatacagcttggcatgaacctgtaggccaaacttggcaagccacagggttataaaaactgtctcttgattataaatggcttctagaagcatgagcacccaaaaggaacatgacccagacatcaatcctttgttccaaccacaggtccacttacctaggcaaccctccctcgtcccaccacttacctaggcaaccctctcacatcccactactcacctaggtaaacccctctccccatcacccatgaactttttaccctgccaacatcctccttctatagttttctgacagtctgcttgaactaacacctggctcttggcctcgtctccccctcccctttaccccaaactactgactatgtaagctagcctgggaaaaataaaatttgccacttgatcagaatcctgtcttgtggtcattctctcgtgtcttttgtccccattcccctccctggacttcttgctctaggttgctgtcctgtgggtcgggactgtaattccagttccaagggatcaagtgcctccttcttcaggcaccaggctcacacaaagtgcatatacagacattcaggcacacacacacacacacacacacacacacacacacacacacacacacacacacatacacacactaaaactcaataaaccaaagaacaaatagattaacataaaatccctgttcgtcagaaacatgagtgacatcagggagttaagagtagaagcagaaggacctgcaggaggtatttgcagaacttagctagaaaacaatttccaggttacacttctgtttcctgttagaacaaggtctgaatctactgcttcacccatgacaactctctctgctattgcctgactgactgcctaaaacattgaaagcagaagttctgtgcctgggtctatttccactcatcttcatggattaccaaacatttatttcttttctcatctgtggtgatgggatggtcaaaaaatcacatcaattgaaataataataaggttagatgcttcttatacttgttgctgatcatttcagctttttaaagaattgcacaccaaatcctgtaatcaatgattctctttgtctgaatttgcacctcagccatattgggcacttgggtcacattcccttttctggagaagcttcttttaaactactctcagacctcagagttcctggatctttcctctgagagtctgtgcaaacttcccattgtcatgataaaatgcctgagaaaaatcaacttacattacagcaagaaaaaaaaaaatcatttttgctcaccacctcggacggttcagttcttgtctttgggcttgtgatggcctatcaggtctactcactccatgattaccaggaaacaaagagaaagggctgggctctccaaatcccctttaaaaccacactcctggtcatttgacttcctctcacattgtcccacttttcaaaggttctaccatgttgcatcaataccacaaactgatgatcaaagcatgcagataagtcttggggagggggcattccaaggtctaaccatggtaatgtccttgtcagttttcatgattggcaaaaatctatgaatgttagaacacctctagaatgttctgaaatttcaagggaatttgatcccattcttcactcacgttttttcctagttaatttcatcttatcctaccccaaaactcttactaccaccccaggtcaacgcttcatgcccttgtatctaaatatctcagttacatctatgaatgatttctcaaatccaacctgcctaaaacatacttgataccacagttggtactccatagtgttcaagtcaaaaaatatcactccatgtctctggtagccttttccatctcttttgtccacacttttaaggttgtcctccataaatatcatgcatatgaatggaaataagaagacaagaatgcctactaagcactgtaatagaaagacagaaatgagagaagcttccatcaaaagagattaagtaatcatggcctgtcactgaatgagagtctatgaggtctttacagaccatgaaatagcttgattactcagtgtaaagagcaacttgcaaagcagtagaatatcagatggagaggatgtgaactgaattgcaacatggagcttttgtcaaagtgtggaacgccgaggtcatagacaccctaatgaggcagctaccacaccatcccagctatttaactgcaggttgaacagccttaatccaaaaaaaggaatgcatttttttttaaacgccagcatgatactatcagtggaaaattccacacctgactacatgtaactatgagccacaataaatatgtcctacaaaaattgggctagggccggcatgtagctcagtgggtagaatgcctgcatagcatgcataagggctcaggtgtactctccagcagcacacacaatgagagatgaaggtgtatgcttgtcatctcagcactcagagggtggaggctagaggcccagaagtttaacttcatctttgattatatagagagtccgaggctatcctgagatacataagaggaccggggcagtgatatatttaatacagacacactaaaaagggggaaatcatttacttttgcataggccacctcataaatgacattggatttgaccttgactctgggagctttacattttctaggctaatgctttatcactgggtgatgtgtctagtcccaagttccttactttgttcaactgtttgcatccatgtatataacgtatgagattgctgtaataatcagattagctaaagaatgcagccttacatgaatgttgttcagccaatgctgaagacagtcttgaactcacttgtttggacaacataatcatttcccttcacattgtggtactactgtaagtctctttatactgcggtttgtaaataattcctaaaagtttatgcttctggtttactttgaagtattttagatattaggggagattggtgggtatatagaatgtgtgacaaagcaagaaaagtaagtctgacaacaacaatgggatgctgaacatgtggatgaatgttcactatgaaatctaaccttctgcatacttttaaaatctgacaaggggtttgaagctcagtggataagagcacttgctgctcttgtagaagacccaggttcaattcccagggcccacatggcagctcataaccatctgtaaccctggttcctgaggatccaatggacaaagcattcatagacataaggtaaaattagttgattaaatgaaaaataataaattaaaataaaaataagaaatctgacaaagtattaagtgagccaccagagaaaagaggaatatgcagttttcctttggttatataaaaacagatatctcagacccagatatacagggtctgtgctggtagagggtgcgcatgcatcatgacaattggaattttagcaacttaattatgtcacaactgtgcttctgttacagggacaagtgcagtcagagcaaagggctcctcttagcactctaacaattgctcccaggcagtttgaccccaaagccaggagacatccactcacaatgaaggagtcagctctgtctctatgtcactgtgtgaccttgagaaagggctctaccttgcccctagcttgtaccatcaggacatgaggaccactgctgctgctaacaggacctctgaggacagcactgaggttgtaagggacacacagatgctttccacaaattcaaggattctttcttctcggccttttacacctaggcacttttgagtgttccatgaggagtgtctgggcttgtaaggtgtgatgtatgaggctctcttctcccaccctctggggttaagcctggctccttcgtagccaccactcaataaatatttattgatttgatctgataacctaaccctatcagaatgcatttattccagaatacatgaactacttcttcattacaagcacctccacctaaagtacatgctgcagcaaaactgagttctggaagtaatcctaggagaccttgaagtgaagcagctctatgtctgaggctttgtatccccccaacacacacacagggatgcataccctagagtcaagaggagagataataaatctaattgattgcctttcgtgttatcttaacacagagtcaggcacaaaccatgctgcgatatttaaatgaaagccacacagactcaacacgatgcctgggaagagaatggactgatgttcttaattttgaaaaactgtattggtaatcaattggaatgcgagagcaattgaaaagctgtccaattttcaattgcagtataagttgggaaacaatttgaaaataatagctcatacaaagagtttttgaggcagtcaatatggactccgggtgaaggacaaataagagtttggcaacgtttgccacgctcatttacatgagtccgtcactatcctggtatccagagcacccggagatggtccctccaccccccaccccctcacacacacacacacacacttgagagctgaattggaatctttcaaagtgtgactttgcagagggacagtcactgagaaagtggttctcacaagcacagagcaccgcaaatgttcctgttaatgttcaatcattataaatgtattgacatatgtcatttatggaaatggtcacaatgactacctcatgaaagcactcctcacaggcagatatgtttcactaccacccaaaggtgtaggggacagtgtaagccatgcctgctagaagctggctacaggtgtgcctgaccacgcctatcagggtgtggtcaaggtgaggccaggatgaccagtgatagggttttaaagggcttcaaggcacatgggagtcccttctctctggcctccttgccttgctgcccctggcacgctcgggcttgcgtttggctggtttttatctaaataaagatatcttaaccttacaaactacggattatctcgtactgtaagccacgcctgctagaagctgtcgcgacttacactgtccccttacacaagggctttgatccattgtcaggttactcctcctaatggaaaacacatatatggcttttataaaatagaatcatacaaaaacaaacagagtgtggtggcacccagggaatgctggcacctgggaggtagaggcaggaggaccaggagttcaaggccagagtctgttagatggcaagttaaaggctaacttatatatgtgagatctagactcaaaaacaaagacaagaaaatttacaggttatttacttatattaagaaaaagtttgttgcttaaatttcattttatcataatctctggaaatagaaatgatagaactcactaacaccctttattttagatattcaaatctgttgtttttaagacttatttttatttattttgtcttttcaagacagagtttctctgtgtagccttggctgtcttggaaattattctgtagaccaggctggcctctgcctcccacattctgggattaaaggcatgtgccaccactggtttatttttattatttttaaatatatgtttgtttatttatttatttatttgagtacaggtgcccttggagtcctgaagaggacactggatcacctggaacaggattcacaggtggttgtaagctatctaacctggacgctgagggcagtgctctgcaagagcagtaacttcttctgaacgctgaacagtttctccagcacttcagatgcagttttggaaggtcatataagctacgtctatctggtagaattaagcagaggactatgtcatttgtgatgttaccacacttcctgccctcaatattcagggcatactctgtgttatattctatattataaatagtgcaagtattgttaccattgacagcagagacagtagctaattgactatgatagagttcattttcttgcaaatgaatttgtatttatttctaaatttttgtgactattccagaatgaagtaaataccctttgaaatggaaaaacataaaataaaataccatggcctattttgtgacctccctttttgttctaatgaatttaacaagcagattcttttttctaggccagtgtaaatgcagtgtgcctgggacaatcctaggctgcttgtgaaactccttccagatctagtttgctatttttgatggagacacatgtctgagcacctcatttgcatactcacagggacacagagcagacagctgtttgcctacaatgactgcacttggacccacacagacatgcaaattagctgatgcatagttagtgaggtttcgtgtttattaaatttactcacttcctaataggcccccttgacaggagctgaaggaagaccctctaaatgtgggtctagaatgtatgtcataaagtcttttttaaaataaagcagataaaagacaccccgaaagaaacaaatgagagaaccattcttctagtccttaacctcaaggctacataaaaaatattcttcccaataaataaaatcagttgaaatttaaaaactgtgaaatttgtcattgaaattagcatataacttcccccccctccaccaagtcctagccaggggtccagaagaattggaccaacacagtgtgtcctggacgtgcgtgacaggacttttgtactcataaactgacagcatctgtggctgcctgcacaaaaccaatgccaagtcaagccagtcagcattgcagcacggagcaggaagggattcataggccctagctaagaagctattgaccctggatgggttctgagggagggagagtcagttttctttaaggatatggctccctgtaggtcaaacactctccaggggatggctacccagacaacagtaaatgggcaacacatgtcttaaggttttgaagttgggagcaggtaagagaggatagatctgggagagtgagagggtggagtgtgggtaaatttgtgatcaaaatgcattgtgtgcatatatgcaattcctggagaatttataaatatattacataaaacaagggaaaaaaccatttcttttccctaaagttgtcgactgtgtcatgtagctaatgactttcttctatgcttcaagttattgtcagtcacaataagtcatttctttcaaatttcctcctaaaaacagtcttcattcttgacccataacacagctgcattttagaaggaaagatgcccaaaagacaacagtgctttcttgagacccctgatacctcacccaagagcaagaggtccttgagggcactgatgcatttctgtcagtctttgtaccaagcattgcctatgggatgaagacaaatgcctcatgcgtatgtaagcatgctaattaacaaacctttaggatgtatgcatatataaaggtgtaatcatatattatcctctatatttcccaagcatgtactaaaataattacaattattaaaattgcaattttgagaagatttttatttctggattgtcagcttccgatggatggattataaattataactgcatatagttttattttctgagacagagacaggaagatcattgcaagctcacaccccatctgggttacacagtgggttacaagtcagtcctgactagagtgagaaccagtctttaaaataaaagggagggaaggaggaaggaagatttttctccataaatctttgcaatcaaaggcatctctgagaatagcaaactgcctccgtagtgacccactggaagcataggagacatctttagtcttgtagctactaaaagtcacaatcttgaaattccggtttggagccctaatttggcagaatttaaaattgtatgtgaaagcatcatttacttatcttaaataagagcttcatgtagtccaggttagtttccaacattttatctagctaaggttgatcttaaactacagatcctccggtctcagccttctgggtgttggcatttctgccaagtgataccatactcggtttgcatggtttaaattttaaaatctttattatcagagcacagtaataaagtaagcatcagccccaagagattagtcttctgtttgtcagcattgaagaaccccaatgctcttctcagatccacccggggaaaccgcctggcaaccttaactgccagtggcaaaccttcccgttttcaaagtccattgctctagtgcaaacacctctatttactgaaatggtggagtcatgttattccccctgtgttagctccccctccctggtaagattttaaggcatgttcctcacaaaattatgattattatatcaaataagcagtgaatagtgttaaaaccttaaaaaataaataaaaataataccaatgccagtcatttcttctcagtgactgttttatccaagcaggtcattcaatgcctcatggcttggctaactctacctttcaaccagagtatactcaaaactggagggctaatgttgggctcacctacatccaagggcgatgcaatcattaccaagggccagcaccatgctagtctttctgaaaagcatttacttatcatttcacaaaagactcaaaaccatgctcagagcctgcatgctttctatccccaagtctctactctaccatcaaggatcttggcaattcttttgttctgctatgtcaaataatctcatctcctttcacagacatcactggaaatttgtcatttgtcctgcacacttcctaggagaaagcgaaggtcttgcattgttcaaagaaattaagaccattggtatctcttggagaagaaagtactatattggtttgagtttgcaaaattgacatcatagaggtttaccaagaagtcatgcgtctttccacagtcatgtgtgtatgatgagatctgggctccctgaagctccagggttccctccaaacagctgctagagaaacaacagccatcaacatctcataacatcaaggccacagcagctctgaaatggaatgtagagctaaataaaacccttactccagatccctcttcccaaagggcctgatttctgtcctctcttggagctgcttgaaacaagatgagaacagtggggcttccttagctgattgcttgtgacataattagctgacaatctggctcctgcatattatgtgtgaacaggacaacaacatgggggtttcggtgaggctaaccagtctggaagccttttgacatgaagggaaaccctgaaaaataactagatgagaccccagtgctgatcttttaagccagaatcagtctggaagcaacagaaacaaaggcaatgccagtttgtcataaatcagaaatatttacctcagccctagacatgccaccctgctagctgtagtggtgggagaaggtctgaactaagtgactgttgagtgactttaaactcaggaagttgggatttagaattcacacctctaataaactagtgtctgcaaacttaatcctgatttccaggacactttttgttgatttttttttctctgtgactttggtaatctgacaaaagattaccaaaacacgaaaatctatggtggaaacatctgtagtgaggaggaaaatagaccttgcttttggtcatgactgtcaaatagagacgaagataaaaagcaaaaaaatgaaccataaactcattttctttaaaagaaagcaaaaaacccatatatatgtgtttactaaacattatgacattaaagtgacttttgaatttaactttgaaaagcaataagctgttctgttactgccatcttatgtctcagtcaatacttttttcttcacagtggagtttggttcatgcccctcagatttctaaagaggcccagaaaagaggtttgaatatctccatagtgatatattctcctctctctgtctctgtctctctgtctgtctgtctgtctgtctgtctctctttctctctctctctccccctccctccctcgtgtgtgtgtgtgtgtgtgtgtgtgtgtgtgtgtgtgtgtgtgtctccgagtgtgattaaagagaagcacccctccccaccccccactctccccaagctttcccagatcacatccatcacgttgatcagccccgaaaggcaacatattgtctgggacccggccaacgagggatatcaatttcacaattgcacttatgtcgttcagccaggagccggtttattcttggctcctgaagtctgagacccactttggaagctgcgttcacacgttctcgctttctgccagcttctggggaactttctctttagtcaaacagagttgtctctttgcaaagcaaattcgccccgtgtgcggcagcctggaaccagacacacgctacttctctagtcatgttttatattttgacagagttttgggagatttttccttttccgttactaattcttttacagagagagatttcatcaacacgagggcttcctttcaaacgaagacccaagaaagggcaggcatccgaggtagcaatattattcaagaaaagtttttaaaaagctgtaatcgtactgacagtttgagacttatggtaatagcagaaacagtgataattaccagttatgctgctaaaaagtcagacccatttggggtgcatcgtttttggtgtcagatacataagtgtcttttttaaactcatttttaatattgtgtattgagaattagagaattcacattgtggctcagggcctcatcatttgacacaaaagtgttcaaaaatcagttcatgtcatgtttctccctgtaaaatacaggaaatatgttccctttaattcctttactgtggttcttcttagtggccaattcctcaccctcttcagtcactgctcctgtctggaattctgcctgatcagggaagctatgctcacaagggtgaaaattaggtggattattaaaacaactatttgccagaaagacacacccacacaaacacacacacacacacacacacacacacacacacacacacacacacacacagagagagagagagagagagagagagagagagagagagagagataaagctcagtaaatagaaacgtccaccagtgtgtgtctttgaaacatctcaagttttactgaattgtcacaggtaactaaaattgagttggccgttttaattttgttacttacacaacacattgcaaaatgaaattaaatagcttatttaaaaatatgcccctggttagttttaatagtgcaaaaaaaaaaaaaaaaatcatgtcaaactccaaaagccaagtcatcctttttcctcagttatattcttgtagattagggtggcccctgctgtaaattcttttaatagttaatgagtagataactatttattaaacaaatatgtgtgtgctatatatctttagacttaaggggaatcatgagatactagtctcccagctttagatatcccaaaagggtggatttaacactggtctcaagcactgtttaaatcattttcctcagagagaacgggtctcacccagcttgtgctggtgtctgtctgatcagtttccttctgagtcaccagacacatctttaggattttgtcagctagcaaaccctgaaaggacgccatcacaatgtgtcctgaaaatcaactcagtcctgttctgatgccgggggcatgccctcgggatgatcataagcactggattcttagtgtgttgaaatggtggagatgtgttaatgaagccatggccccacctccctgcaagaactatctttgaaatggacgctacattctttaattacctgcaaatgctttccttaaactatttgaaaatgcttccttttgggatctgggaataaaatgactctttcagagcctgtgtttgcagtttaacctttgcaagcaatctttatttttagcataaagactatctgatcttttttttttttcctattgatacaaagtactgcaagatctctaattttagtgttcacacttgctatttctccagaggatatttgtgcactcaagttcatcttagaggacaaaaatactaattaatatctgtgaatcaatgggtagtagtatacaaatctttttttttttaaccacttgtgttaaatatgtccttgaatgtgccagcgatgactgtcactcaatctcgagccagaggagaggtaaacaatggctgtctgtaatgtagcatcctgttggggtggtgccgagacggggaaataccagcagaattgtgattctttgaatttagactttggtaacatgtactgtagttttgattgattgtattccttagtgtttatttttctctaaatcatatcttaaatcccagaatggattctaaccttaacggtggtggaggaaagctattattcgcctaaatgaatttcacagccagagataatgtatcattaatttaactgagttccctggctttcttcgtcttgattttcccgttagatatctacctcctccaaagctgccaatatcaccaggcaccgaactaagtcagcagttctgacatcttcatttcattgtccttttccgtaccttcagcaatgttaatgttacaaattacaggagggcatattaatagccatacccaagaagcagaaagaaaagtgcatttttttttaaactaagtactaacttgggatttcccccagcccattgtcaagtcagccgaacccacagctcttccattgtgatgataatggattccgtgttgttggcgcaaaggtcgtgaggtcaccgtaagcttcttaatggactgtgaaataactttaactgcattaacctctctggatcacatgggtggcaccaacagccactcctgaaattctcattcgcttatagagacaataccattagattattatattttccatttggaacagcactagactcaaagcaattatgcagctaagcatttccactaagtgaataggaccttaaagaagattaactagaaagtccctgacactagatagtgggggaggggcagacattacaaaatgtcactggactttagatgccttaaactcaaagtggctgctactttagggtttaggctatatagtcactagatgaagaaaattatacacctatatgttgggggatagacgtgtgtgtgtgtgtgtgtgtgtgtgtgtgtgtgcccaaaatggattttttatgctttctacgctgatggatttagaatagacacatttcttcatctatttgtttccccaaacaaaatcacctatgaagccagaagccagagggaacgatagtaagagcctcaagctgacccttccctggctttccaggcaacacacactcttttcctcaggaactgaaatcttgctgttcctatttccacctgctggttattgtttttaaaagaccaaaatgatttcctttgaaagggcacgaagctgggaagccctgtttctgaaggatgagaataattgttactggttagtgtagttatagtcaggcatctatttacccacaagtgaaaccctttcaacaagtatccaagagagatttaaagggtaccacagtcatcagtattatcattaaagtacctcattgtcatcttgacataacataacagaaacacacatcacattaaacatatgctttaaatgcaatttgatttcctagtgggataggaaccggaaactgaaaacaaagcagaccctatttctttgcttctagaatgtatgttttaatgttttgaaaatcattaaattgcagccattttttattcattatagtccttttaacaatcctgggaactctattgtcattgaaggtattttggaactggaaaagcacatgaaatagttggagataaaaatgcccttcctttgatcttgatgtgtgtgttgtgttttaaccttggaaaaactgtgtgtttctttcttttttttctttctattttttagaaaagatttgataggggttggttattgttttccaacagtaaaatagagaaggagagttgaagacaagcttgatctcttaagtatgaaatgacactgctggagctatacaaaaatatgatggggtaagttgtgtctttgctaaaagccaaacacttcaaaactcactataggatcccaacagctacagttacgtatcagaaacactttacaaaagtcttagcctctttttctggaagctgctttgacttgtccctcagaaccactatgattcagatggattagtcagccactgtattcattaatctgagaaacaggttttggcctgtgcatgtggctccatgggtagggagctggtccagcatgcacgaagttctggattctaccaccagatgacataggaacactgggctgctggtgcattcctgcagtccctgaacctaaggtggagtcagaacgaacacaagctcagggttgtctgcagctacacagtgagttcaaggccatccgtagatccatgaaactttgccttaaaagggggaagcaaacaagcaagcaattaccacatggtttgtgtatgtcaagcattttctatacgtgtacattcaaatatatgtacattcaagagatacagactgtcaattgaccatgaaagacccccggaggctcaggcccccaggatctcgatgaccccaaacaccaggcagatgcaaacagcaagaggttttattgcagctgtttaacgagctaaccccatattagctctggcctttcatctatccaccatggcggatggctgggaaaagaccccgagaaaccacagcatagagttcttatagggcaacataaggggagtgtctagggatacgcacaggctcaggatttgtgtgcctccaggcttggagggtttgccctgtgttgattggtcagctggttgttatggcccataggtcctcccagggtgattgctatgttctgtgcgtcattgctgtgtgcttgtccataaagcacacccagagccgtaaagcatagcgccaccagctaacttctgattggtcccttgccatgaggcaggcttctgacctcctagtgactaagacaaggtcagacaagcacatgttcggctgtcatggctgctgaaatgaggaactggtcccttcaaccagtgaaattgctgatgcaccctggcaaagtgggactcagaaaagcccaccatcatctaccatgttggttgaaacataaagctgtatttcaaacttttgtatcattcttggtttatcacagtgacactccttcccagctggctgggcattccagaacatcctatgctgtctttgctcatctttcggcttcttgagatggcttcccaaacagaaagagaaacaaaactcacaaacaatgtgatcatctcaataaatgtggggaaaaaatcattttgacaaaatccaatgtcctgtgatttaaaatccagcaaactaagaagaaaaaagaaagaaaatgataaaagacaaggcttttctttagctcaggagtaagaaaacatgtcttatctggctacttctattggacatttgtactaaaggcttatgggtaattaagtagttaaaaaaatattaaaggaatccataccgaaatgggagatacagtgccatctcaatccaccaaggacatgagcttctctgaagaaaattctaaatattccaccaaacagtaatcacaattaaatgaatttcacagggttgcaggatacaagatcaatacacagaattcaatcatatttctttatactttcaaatgaacaatttggaaaacaaaaggaacaattcccttcataatagttttgaaaaaataaaatgcttaggaagaaacttaataagagaattctgaacttagactctgaaaagaaacaaatgaaaatactatagaaagtcactaaagaagatcacataaatggagaaacaggtcatgttcatggattgggaggcaaaatattagcataagggtgttcactgaacagatggtcactgtaattgctggttttgttttgttttgttagttttagaaactaacaatttgattctaaaatttgtatggagttgtaagtgacacaaaggagctaagataatttaaaaaaagatgaaaaattcttagtaaactatcacttgaaaactggttataaaacaaccttagtcagagaatgtgggcaggagcacaagacaaaggattcagattaaacaacaatggagatgcccttgcacacacccttgtgatggctgaaggcctttaagatttaaattgttactcaagtaaatgttattaaatatatttagttaatttatatttttatttaattatatctggagacagtatctatcccagtttgcttcctgttactctaataaataggatgaccaaaagcaacttagggaggaaaggtttgttttatctgatatttaaaggttatagctcatctcaaaggaaactgaggccagaactcaaggcaggaacctgaagacaggaactgaggcagagcccatggagggagcatgctgcttattggcttgttctcgatggcttactcaccctgctttattatacaacccaggaccaccaccctctcccttgtaaccctagtttgtgacaagttgacaaagatataccagcccagtatcacactatgcatccttgactggcctagtacttgctatgtagcccagactggttttgcacccacagtagccccatggcttagcttctggagtgctaggatcacaggtagatgccaacccatccagctgttagaatctaattacctcaaggagacatacaaatggctgataaacccaggagagtgtaccgtaacatgggagattacagtcaagtcagacagaaacaattgctgagactgggaggatccacagggatccaaaactgctgaagggagcctcaggtgcctcagtcacttgggaaagaatcaggctccttctcatgcgactgaacactgactgtctgtgtacgcccacaatgccattctatacatgagaaatggaaacgtatttccacacagaaacttatgcccaagtgtttacgttagcatcacttacaatcaccactaaaatgaaacttgcgaagaaccagcaggcaaatgcagaaaacacaggatttccacacaacagaatgccacacaaataatacatacatacatagtgtgttgatgcatgctacagtagggacaagctttaaaaatactatgccacgcaaagcaagctgattgcaaagagacgtcatgatattgtgagtttcctatgcattgtagtttgtaagtgtgggataaaatgaaattgctttacgggtcggccatagtgctagtgtacatacctgtgaatcttctagaatccattgacttggatacttgaaacaaatgagttgcatgctgtgtggattgtgtcatacagtacatgttttctgatatgtactctagaactctacagttatctttcaggattagggagacattcccaatagtaaacatgaaatgtaaagaactcactaccctcagaattaaagtgtgagaatcaaactggggtaggagttaaagcaatcaccagcaggtcctttgaagaaatgggaagacaccagtttattttgtatgaaaagtctaagtcagtttagcctgtgcccctcccacacggcaagaataggaacttgagctctccagtacaaaaagtcaacaccatttcagcccctgtagtctgagtgactgttgcttgagtaccctcaccctcaccacgccccctctttccatctaagctgggctttggcagcgttctggttcccacatggtgttctccagttcccaccatctggctcacatctacctttccttaagaatttttaagcagcaggccctctcttctgtgccccatgctgctggtagcattcccctgaaagtcagaaatagtatctctcagattctaaaatgaagcaatatttaacatgtaagtatatgaccccttcagaataaatacaacctctgagctcaaagagaggccccgagatccatttattatctcaaagagagataatgggtagcggtgtctgtgtgtaagtgctctcgctgaagtttattttcttcaggtcctaaggtggctcagcttgtgccacagggcccctcgctgccttgcgttgtcctgtctgagtggagttaccttcacaggtcttgctcccattagcacccaccacatgatggatttgtaatccacgcagacatttttcatacatcagaagacaccttgaaaaagcctggagatacctttattaatttcacactcttcaaggacatttcaaaatcccccagtgggctgtttcttttcctctcctcagtgtacctgatctgagaaaatattgagtagtattctgtttgctccttcacattcaggaagggaaggtttggggagtccttgtgatggcccactcaagttggctcactggctaacatcctacgtgaaccacatcaagactctgatatgggcaactgcattaagtttcaagtcctgtcataaaagacttgagataatcgctgtgagcaagacttctttgggctcagggtttctgaggtttctgtctgtgactggctggctttattgttttgaggcctatggtgccccagaatactgtgccatgtgtgggagtagtggaaaatcttctcctgcatgactgcggggagcagagtaaaaggacaccccaatgacctgactccagtaaaccagacctcttgtagattccatcacccccaatagttccaaatgctggtgacagagccttagtcacccatgcctgtcttccatgtctggaattcacaaaacactgagcttctttctagagactgttatgtgagaatgtacaattagactcagccctcaagggggtaagggcaatatcaagaaatgtctacctgtagtactaggcaggctctgggcaataaacaccttaaaaatgggcaaaatgatggagagagaaagagctcagtgtattaactgctggctgcataagaacaagggctagagttggatcccgagaatccccgggaaaagtggacacggagaagcatgtttattatcgtggtgcagaaacagactgatacctgacagtactcagcaagccccaggccacagggacaccaggccaaagagcaggatggttgtcctctggcctccatacatgacacaaaggcatacccgaatgcatgcacacagacaggacataacattggaagaggggcaagttcctgtgagaatcaggggaaatagatcctctctgcagttaatagttgtaaaaggagtccttaattggtctagataataaaaggccagagtcagatacagagggaaatgctgagagatcagagagaaggagaaaaccacagcacaccttacgtcctaagcatctctgcaaggaagagagggatttcctgttcgtccctgcttatatcctgttactgcccagctacattacttcctgcctgtctatatggacctccagacctctatggttagctagtggcaagctccattctctgaccccccagacaggctggatttgtgcaagaaagatatcaccacaaatggtacttcgcctgcaacctggaagtggacctgatttcagcagcttacagtggggacaagtgtactgaagacaaaaggagatgaagagacatagagcctgggagagttaaaggaaagatgaattccagtgcttggctgtgctatggaaatcaataggaaaaaggcttggaaagtgagttgaaactagaacaggattataatccctagtgaagaaaggtggatttcccaacgagtgtgctaattacactcttacaagcccagacaagtgttaatgactgctttttagatggagtgtaaggggcattttgcagtggaattcacagtttgctgcagtgattagaatatagtttgtcccccaaagggttcatgtatcagaactttggtgcttagggtggtgatgttttgaggtggtggataatcttcaacaggcttggccttgtgggcactaattagatcttttagagtgctacccccagaaggaattaaaggagcgagacttgtttcctcacattgtctctcaggctcactttgatctctctctctcttgcatacacaccgttcttgatgtcatccaccacgctgcaatccagccagggctgccctcaccagaaacagcaccacatggctataatgtgctgccttcaaactgtgagcccaatatgcctccatagtttttgaagttccttgatcttttgctgtagtggtaagaaagggaataccatagctggggactgtgagtcagtcttgagaaggaggaaaggaaaaatgaaaacatgacatgtggctacacagggcaggtgaggagtagaatagattggacgtgggagtgtaagaaaggaagagagatcaaggtgggctgtgatgaactttaggctcacccagatgtatgcagagtctaagaagaggctgggactcctgagtgtagatttggggtccacctatactcatggcggctaaaaacatcttaaatcataaacagatggctatatcatgaggaggattcccatgagtgggaattatggcccacaaagcagattttagagcaacccattaagggctgcccaccatgcctggtgatggtgaagaaagagccaattctggcagacacagactggttgaatatttatcttggtgcttcaaggccagaactatttggaataattttccgttgtttacaggccattggatttatgatattttgtaaaagcaacctgttcaagacaaacaatattagcagcttagggttttactgttcaccaacttgtaaaacacattccatacttttgaggaatttaggagaaattactgggcaacctagttttcaaacagtttctagcttaaatattcatttttcagaaagacatgagtgaacccaatgagaaatctggtaggagatgagaagataaggtgattatcattaaagagcaattaatgaatcttataattaattaatggtgactaacctcaatgagaccctcaagtccctacatcgcttgtaagtggatcaattttataaaactatctcatattaaaaaggaaaaagggattcaaggtttgaatttaataaagcaaactgtgaaggtcagccctaaccttcacaatgtgacagaacagaggcaactctttcctaaactcaaaagttaaataaaggaaccaagaaaggggaaaagcatgtccaagacaatcttggaatgccacaggactaaacatgctcaagagaggtcgtggaattcagtgaaaacctccacttttcagtaataagaaaattctttatataattgtttcactttttttctatatataccacatgaagaacccatccttgccagtaacttaaattcaaactctaggaagaaaaaaactgcacatttagctaattgcttccttttttatttttctaagtgagtgaatatctcaagtatagagagaggctgtttcatttggcttagggggagtccttctgtttgtttaagtaactatatttggtaaggggagataattctataaatgctttgaaggataaccttgacttccctaatcaaatcctcagcctgaaaaccataagcaacgttagtacccatcacagcagtggagcaggcagacagcatgacagggcatatattggggtagagcaaggagagtgcctccccaccacactagttgcatagcaacagtctcaggattggtgcacctctgggcttgggcaacctgtcctgtgttgattggtcagaagcagctgcagcaagattgctatgcctagaggccattccaggacagttgctaggcccctgctttccactgttatcagtaaagcacatccagagcctgccagctaatttttagttggtttcttgccacatggctaatctaaactagtggaattatagatgggtagtcacattaaccacatgtttaagtgggatttgggacccaaacttcagccctttgtgactttgatttagaaggaaattcaagcaaggtttcccactgaacccctgacacaggaaggggcccagctctgaaaactggggtctccttagttttttacattctgtttagaaaattctggccacttaccctagcaaactttctgaccgtgggcaactactttaacccccacctccttttggcctcagttcctgcatagcagccatatgatagttgtggaaataaaacagtttgtatgacatgtaaatgaacgctaagtaaatgttttataattctatctatctacacgcaacttgcagtgtctgggagatagaatgcaaatatgtctagaaaatggttgaacatacattctgaggcaatgaaatctagatatgtaaataagagagaaaaaccacaaattggctgctgcatttagggagtaggaaattaacaaagggaaacaaatgctaatgaagaagattggaatgtgccttgaattaagagtatgcagaagaagggtgaatgttctagtttccactttgttgctatgttaaaatatccatataataagcaaattggggtagagggttcattctggatttccacatcccagtccaccactaagggtcagtcaaggctggaacccaaagcatcatcttcacagataagagtaaggagaaaatagacatgattccttatttgcttgctttctctgctcatacatagtgtagcccttgcccagtagaggtgatgcttgtggtaggctgagtcctcccacattaattaaaactcaagacaatccctatagatgtgccaacagaccagcctcatctagacaattcttcattaacacagtcttccagagtgattgtaggttgtgtaaagttggaactaggcaacacatgtcatcgcctccaggagaactttctaaaaggatcataagaattgattcgactggttttaaagatagcactgccaaattgcaaaagtgatcaagagaataggaagttgaagggaacagagtctttggagatttgggaaatcattttgaccctcagagcccactacaaatcctacctaaaaagttctccctcggctggcaagaagcctctgagggtacaaggacttgcttacgaagcctgaagacccaggttgactcccccagaacccataaggtagaaagagagaacagacttctgcaaattgtcctccctacctccacaagggcttgcctcacccacctagaacaaatacatgtttttaaaaaaagtattgccacaaagtggtggcacatgcctttaatcccagcacttgggaggcagaggcaggcagatctctgtgagtttgacatcagccttgtctacagagtaagtgccaagaaaggctccaaagctacacagagaaaccctgtcttgaaaaaccacacacacacacacacacacacacacacacacacacacacacacacacacacacgtcttttgtatctgacaaaacttactagaagaaacctagtttttctgaatgatcttataatggctttttgacaagaactttagatttttctttgttgctttggtgtctaggaagcttcaaactcaattcagttcctgtatggagttctgtgtctttgattatatgaatgagtactttaaagtttcaaattggatgattattttacccccaagttttcattttgattgtgaaaagacttattatttttttaaaaagatttatttatttattatgaatacagtgttctgcctgaatatatgccggaaagccagaagagagcaccagatctcattacagatgtggttcccatgtggttgctgggaactgaactcaggacctctagaagagcagccaatgttctcaaccactgatggatcagccattaaaggctaggctcacaaccagaaatgacttaatttttaaggcactagattctgagccactctagattccccatccaacattaaagggttctttatatcttaataaactggggttcatgaacaccccaaataaactcgggctactagtttccctttccatcagtaagagagaaacatattttgaaataagaatttgtttgcattttaactatatgtatatgtgtgtgactgtgtgggtgaggtcagaagagggcatggagtcacatggagtcaggagcagtgtggagctgactgacctgggtgctgggaaactgacttgggtcctctgcaagagctgtatgcacagctgcagagtgatctttggttttgtttttctaacagcctatgttagaaagattgacaattttgcttgtttatttttaatacagttcaatactaatgaagggccaataaaaatagttgaaagacagtatcaatatatagaaatcaataccatggattttaaaatcaatattgcaataaaactgagaaaattcttgaggaagttagaactgttgagatcaacacaacagtttcatttatggtttcacttgcaaagtgcttgtccttcttctgccagcgctttgtttaaatattcaaactacagaagaataagaagccagagccccaattccacaggagccagagcaacagcacagctgtttccaaatgggtttattataatataatgttacctagggggttggtgagatggctcagtggatagacttgctgcaccaaacctgatgagccagggtacgatccccgagggccacacggtggatgagagaatcaacttctcctcacactcgtgacatgacaggggcatacacacttacacagaataaaaaggtaacaaaagattatttaacaataaaaaatctgaaattatagatgagataactctctctctctctctctctctatatatatatatatatatatatatatacatatatatatataaactccataaaactatacagattttatacatacatacatacatacatacatacatatatatatatatatatatatataatttgaaagagaaacaagattcgatgtgtgatcataagattaaaaagtgagtcagaaagactgagtcttgggactgctggttgaggtgctgactgactggctccaaattagaccacaccaccagctcccagaggaaataatcagaagcaaggaaaacaagtacacataaaatgctctttgttgtgctgattatctcgtgcagtctgtccaccggctaagcaggctatgaaacaagtaaacagactggcttatggctgttccaaatcatggatgcagagacgccaaggacataggggattctcagaaggttcagaaagtactggaagatggggtctcgggatgtggggcctttcatgtctgtgtgtcactcccctaatgctgaggtctgacattaaacatttgctgagagggaaagagtgactaagtcacagcaaacaccaggatacagatttcatatataccaaatgctcacttaacggtttttagtcattggaaagttaagtcgtgtaagggaagtaactcagtagctcacctactgtagagcacttgtgtcatgtgcaggttctaatcccaccatacacacacaccacacacacacacataccacacacacacacaatacatacacacacaccacacacaccacataccacacacaccacacacacacaccacacacacaccacacacacacaaacacatacacaccacacacacacacaaacacatacacaccacacacatacacaaacacatacacaccacacacacacacataccacacacacacacaatacatacacaccacacactcacatacacacacacacacacacacacacacacaccacacacacacacacacacacacacaccacacacacacaccacacacacacacacacacacaaacacatacacaccacacacacacaaacacatacacaccacacacacacacaaacacatacacaccaccacacacacataccacacacacacacaatacatacacacacaccacacacacacacataccacacacacacacacacacacaccacacaccacacatacacacacacaccacacacacacataccacacacacacacacacacaccacacacacacaaacacatacacaccacacacatacacacataccacacacacactacacacacacacatacacacatacacacacaccacacacacacgccacacacacacacacaaacacatacacaccacacacacaccacacacacacaccacacacacacacaaacacacatacacacacaccacatacacacacatacacaccacacacacaccacacacacacaccacacacacacacaaacacacatacacacacaccacatacacacacatacacaccacacacacaccacacacacacacaaacacacatacacacacaccacatacacacacataccacacacacacacaccacatacacaccacacacacacacacacacacacacacacacaaataccatacaattgaaggaaatatatgggtttttcacagagaaaaaaaaaaacctgccagattaaaaaaataaaaactaagaagtctatgtctaagacatctgttcaactcatcctgtaagaaaataatccagatttgaactgtgggaagtacagacatttgaaagtgttcagacaatgttctcctacataaaaactctcatgtactcaggccaggcaaggaagatcacatacgagtctgcacatatctgaaattgccacttgatcccacagaacagtttctaggagattgaattcaactttcaatgctcagtggcccaccaggctttcctggagggtcctgctctgctggcttatggctcagctacggaagcctgcggggcacaggaggtgtgcacaaatgcttgatcattggctggctgattggaaagagggagacatgaatctgcagggcagactgctctctccagatggtcccctgagaaagaacaggaggggatcctgtatctatgtcccagaaaaaaaaaaaaatacaagctgtcaattagattcatcaagcaatgcccaggagaggcatggtgacaccaggctggatcaagacctcattcttcaacacaagcctttcccaatgccttcatctcttctttagcagccccaccgcagggtgtccccatgagtgactggactacacggctctccaagaggctcgacacctctccacatttaagatgagcatgaagtcacttcagtttcatagttctgtttgagcctctctctatgcactgagcttctggtaattatttcctctttcaaaaaaaaaaagtttatttgctgccaaagagaaagtatggatctttgttattaatgttgtagaaatacaaatatgtccacctcaggaaggagtcttcattaactcccacagcccagaaaattaaggcacgcctcatcaggacccacgcttgctgctgtgggctaaattgcaagggactagttgagttgctgggaaccgtaatgctgatggagcgctttccacgtgagtgaaggataaacagcgattaatttcagccaataaataatggtttgaggcccacattgaaagagggacaattacttttacatttttcctgccaaatgagctgataagagaaaacaggggagttggccgcgtaaatcagtcttaattttatcttccccattaaaaagcagccattaagaccatcttcggctcatttcatcctcctcttgttcactttttcaatttgcacaaaaggggggagtttgctcctcataaaatttcactttggccaacctatcatttgcatctgggccaataaatagcaattagcataaacatttaaatcaggaactggaacaaatccttgttcccccagcaagctgttaaattacagtgttttactatatataagaggcattgaacaaaagatctgcagggcgctattatcctcttccaaataggacatggttgagagagaaatgataactcccgaacccatgaacttccccacgcactttgatggggagtgttctcccctagtgggtgtggcctcttgagtgagtgtttcttgcccactgttgaaattatctccccaaactagtaagtgtcacttagttttgtggagtccgaaactgtagtggagaagttcttgtgaacttgtgaacttgtgaactggaagaggaatcaacagaacatctctgggatgaagtcagggttcccaggaaagggaaacacaggtttacctgggagaggagacctggccggaaggctgcggggaagtcagagcctgtgtgcacagaagctcagggcgctgcagatggccacagccttagccacttctgcctgatgcacctgcctttctcacacgcgttccccggtagtggctagtcataagagatgggtcatcttacagaacgtcctcaaaagtagaggtccacactctcctttgtttaacctcggttgctgttttggctcagggttttgctagatacatctttacatcttgaaagagaaatactcacaggaaacagagagatatgtgccaggtggctgtctccaaaccaagttctacgcctggtaccctctcccttcaagccccttttattaccaaccgaaacgtacttcattacttatctatggatcattgaaagtcaaggtgggcacttctcctgatgagcccctaattgactttggctggaaacccagggtggtcagagaggctccgatgctccctataaatgcttcctgtgggggtgggggtggggtgggggcggggcgcggaggtttgggcttactcctgaaccactgttacttggttctcctttgcttgcctgtgaactgtagcacataagcaactagttgattttgtatttagttcttaggctattgtctctctccctgttgtcctttgaggttatgtataatagaagagctgtgtgagtccagccagttcttatatttctatttggatgtgtttattttatgtatccattgtttaaaaaataaaacactttattttatgcctagcaagagtctgtcttctaaattgcacttcaattgaatgatttaatatagttttgaacagaatttttgaaaatcacttttttctgagtgagttaagtgtgagaaacattttcaaactttttattacataaatcttcttatactcaattttctctgggttttagaaacctcttattattctagattggcatttatatcgaacccatgttttcctattttagctgtgaataattctaccttgtccctttgaatacaattaaatcatctatgttacaaaagttgactatctgtcaactcttgcattaggaatttcgtggtagaataactatagaaataggcaagaaagaattgtagcgtttgtttttccaaacttggtaaacaaatgtattcaaaatcagataggtaaaagcctagagtacagatcatagaaaaatgcagcattcaacagttttttaaataatcatttgtctgtgtaaggtggtagaaggtgtagcccatgagtgccataacacacatgtggaagtcatagaacacatggagtcacatgtctccttctaccggtgggtcatagagaactcaggtctcgggcttggcagcaagtgcccttagtccctgagccatctcactggcctcagaatagctgctggtccttctctgtgcccatcatcttgtgttgtctttcctcatctttgttattctctgagatttatgctacctgttcaaattgttttctcatcaccctcaaaggtttctatctgatgaaagcttcaaatctactctacttttttcgtagatgtttatctcatcactgctgcttcccagctctcatttaagctcacctccttccctctaacccaatccaaatgaagacatctcatcctttgttagaaagaccatgtcttcagaaatattttttacatctattgtttaactaaggttttgtacatgccatcgcatttatcattttaaattgtttttagtattcttgttgtgttattcaaccatctaaatctaattctagaatattctcatcagctctaaatgagctatctctccctgtccctgccacttctgcacccaggaaacatttgctgttcctttgcaacttggcctgttctggaattgtcacacatgtggaatcacgaggcaagtaagtggcttctgtctctagcttctttcatttgcttacactgcattttctttttctttctttctttctttttttggtttttcaagacagggtttctctgtgtagctttggagtctatcctggcactcgctctggagaccaagctgccctcaaacacacagagatctgcctgcctctgcctcccgagtgctgggattataggcgtgcaacaccaatgcccggctgacattgcattttcaaaatccatcactgttgaaacacaaacagcatctacctctttgcacagcagaataacactccaacacttttaaaacacatttcatttcttcttccctcagtaaaagtaatattccagtgacttgtgccctatgcctattttagataatgctgttgtcaacatttcaatacaaactttttgatggatatgtttttcaggtttcttggatatatacctggtatcagagttctagatcttgggatgtaagtttttaagaaattaccactggggtgtgtgagtgtgtgtgtgtgtgtgtgtgtgtgtgtgtgtgtgtgtgtgtgtgtgtacctttctcctatccttctttgtcttttagatttagacacatggctatactatacagctgaagccagcctggaacttattacctggcccaggctagtcttgaactcctgatctacctcctaactattggaatgaccggtatcatcatgcctgtcttcttgccttatttttttttaaatattagctatccaaatagttatgaagtggtttcttgttgtggtttgcactttcatatcagtaatgaatactaacattgagtatctttttatgtgtcgtaggctatttgtatgtcccctttcaagagaagtctattcaaacccatgatcaaattttaattggttatgtgtccttatggtgttgaaatgtaaggatgttgaatatggtttgagtatctgtacttatcagatgtgtgattcatgaatgattctcttgcttatggttgttgaactttcttgatattgctctctctgtctgtctgtgtgtgtgtgtgtgtgtgtgtgtgtgtgtgtgtgtgtgtgtgtgtgtgtgttggtatgtatttgtgtgggtatgtgcatatgtatgtactgatattactttgtgtatgtgtgtcaatatatgtttgtgctcatggggagtatttgtacatatgtgtgctcttactgctttgtgtgtgttggtatatgtacatgttcctgtgagtgtgcgcacatgtgagcactaatattgctccttgatgtacatttttaatatcaattcagtcaaattcttatatatctttttttctgactacttgtattcttggctctaaatctaagaaaccattgctgagtctgagatcacaaagactgcttatgtattttttttcttctgacttttccagttttagctcttacttttggggtttctactcctttaggggattatttggcctaacacatgaagtagggggcaggttattctgtcacaggcagctatgtagttctttcagtattgtttgaggaaaggccacctttcccctagagcaccatctacaagtccacatcaaatattggttggccgaagatgtttgggtctatggctgaatcttggcccactctaatgatctgtctgtccccactccttgtcagtgactggagtacagcaacactgaaggaatctttgaggttaggaagtgtgagcccttctcttccaacactgttctgagaccactgcattgcaataggaatttctggataagtcctgcttatctgtaacatgagcagttggaattttggtgagtgtcaacttgatcctgcgagtcagctcagggaacaagcattatacgctcagtcacgtcaactcttcaatccacaaatgggatagttgtacactaatttggaaaatttttatttcaacaagtttttaatgcttcttagtttacaatgatgctaccttttggttagatttgcctttaattattttatttgaatcctgttgtgaatgaccccttactttttaactggaacatttgacaattgcaggaaatttgacctttggacaactttatttccacttatttctttctctccctcagcttctctcccattctcttttccctctctgcaaaatgtgtttctgaatttccaaacacagaattcaaaccaacattaggaatcataccctttatgttatccgaggactgctaattaaaatgtaatgttaaaacaatggcgctctgcctttctttaatgaggcagggagcatgtccccacctgaaaaccgtcgttctgaatgtggttacagtgtttgggcagggaagataaggatggttaaaataccagctgtgaaaatgaaaataaactagttttcattgttgcattctaatattatctattccgtggcatatacaaatggatataagacttctgtggaactaccactgagtcacttaattaccggcacagtgttttacaggggcacagtggacagccaagactcattaagataaaacaatgtggttttgttcatctattcatacacttaataactatattttgaatatctgttactgccagctgtagtgccaggtattaggtgcacagatcatctcaactctgatgaagtaatggcatagctagaagctatggtaaaataataaaataatctgtatctatatgctcatgtgtgtataaatgatgaacattttatatatatacataatgtgcatatatgtgtgtttatgcacatgtatgccgccaagacctattatcaactgttttgatatctaaaagccccaaaacagaaagaattttatgagtttctttagcagtaaaaatctattacattggtatataatgccttatttatttctctgcccatagattcatcatgcatgcatccattcatttagtggggaattttaaattcaatatgcttaattatacaatgctgactcagttctttgaaatattatttatgtagcatgtctttctaaaaaaaaaaaaaacaattaaattctgagatgaccttgaactccagttcctcatgcttcaacatgccaagtgccaagtgccaagtgttagtattgcagacctgtgtctccatgcctggcttgtagtagaatacatttaaataagaattgtgaaggaaaccatcgggatgcagccatgttaaatagtgagagttagctagctaaggagaagttgaatttatctgaaaagaacactctttcagctggatatataagacctgaaaactgagaagaaattgccagaacatcaagaggggaggactgcgtggcagtagtgtttcaggcaaaaggtgagccagacatgggttcattctctgacgaggatgaagaaggtgtttagtggatggaatttagtcactcttgtgcttttgagaacttggcactgacttcctacaggatccatacatgtatttctgtctgccttacctgctcctaccccagcctttttagcattcacagtgttcagtcagtctttggcctttaggcaaaggatcacaggaaggctggaccctcaagtatttagcctgtcagagatgttctggactaagacatgtatcaggctggtgggaaaaagttcttagtagtctattgctatgaccatctgcctgtcagtcttcaattcccagtgaagatgagtcttataaaaatgattgatcaacagatgttatgtttttcagcagtgactttggtcccaaactgtagcagacctttttttgctgtctctattctcagatctgtctactcatggaagtgttttgctgaatacaaacagaataattttatgcgagttgtataatgaattcagacaaactgatttaaatccacattgaaataaacaaagtcaggaatctagaactccaccctcccacccctgttttacattggggactactccaatgcatcatgggagtatccctagccaggcttggtatttagcccatgagctgggctcacgcatgccatttctttaaatgcattagatagtcttccaactcctcgtggtcaggaagtagcaggcctcaccaatgctaagtgggaaccatgtcttaatctgcacagatacttgagttaggtaaagtgattctgactggtgggaactgcagtgcaaactgttggctcttgttgtagattctgacttgtgagcagaaatctctgcataatcattaggtgttcataaaaatattatcataacacagaaagaaattccactgcccaccaagcattgagtcccccagaaaaataaaatgcaatctccaggctctcagcttttctagaaacctgtagaaaaaaggtctgggaatctcactgggtcagaggccacacttacatgatggggctggaggacaataatggattatgggattatctggatgtttgatcacacgggtggcaacagaatggagaataattagcaattggacaaacacttggcttttcatttgatcacttggcttcaaactcttttccaccccgtcacacccgaaggttacagcatatcccattagttagagaaattcttggggagggggttgttggaagagagcccattcagctcagaatcaagggacagcagtgggaaaagtccctcaggtggctctgagatgtgcccctcggggaccatctgaggtgacgacaaagtagaaatgaggcgttttatgagtgagctgacgcagcagcgtcactttggaatttaagcccttcattcccaaacgggaacattctagactgatttttaaggcttgacttacgagagaaaatggaaacagaagccaggcaaagatggacggggaagagttctggagagtatgggaggagactgagagaaacagccatgctcacgtcacccctgtgaagtccattgaggggtgagggatgtttacttaccgaaagatcaatttcttgttctcttccccttttcttaaacttacctgttaatttattcaacccatttgagataaatctctccaaagagaattcgtctgggctctacaacctggtattttatggccctaagaattatcaacttactgggaaattttaaacaaccttgaacttctttcaaaagctagtccaataagtgcattttggacttatgagtgtatatttaaaaaaaaaatcaaaagccaagtttaagagctgatttcctccttttgtgccaccatgaccttcttccctgttctgcatatgtgtataaaacacacctgtatctaaatgcccactatatgcagacacacacaatttaactatattaaaccaaagattaatgtccagaattaggtgactaatataccagatgagcttgggcatttaattaataccgagtgttcaaacataaaatacaagaactcttagctccactttaacatataatttacctagacaattaagaaggatggaaccacagaggtacgatacactggcaactctgttcacttggccttgattaattgttttgttcttgacgatgcctgggtggattcccagtttctgaggggccactgtatcttcgtccagggaggagatcctttcctgtttcctgtgactcagaagatgaatggttacaggcatatccgtggatgcacgaaacggcagtcatctcctggtgggacctggatacctggatacctggataccttccagtcctaaaaccttcccgagagccttcttgaacccaagggataccctctcaactatttctttttgaaaagttacatggttgtggaagggaaaaagaaattgaacagatgccagggggctgtggtggcacacacatttaatctcagcacttgggaggcagaggcaggcagagctctgtaagttcgaggccaatctggtctacagagccagttccagtacagccagggctattatacagaggaaccctgtctcagaaccacccccaatgccatgcagaaaaaaaaatcccaaatgacctgacttaagtttgttcgtgagaaggaaaaataaagttcaacgattatagcacaattcagagatcattctggaatgcatgtccctgttgggaggccttactggctggtcaagggtcgtggtctatcaggacctggcagctttttccaaagcttgatgacatgggatttgctcccctctagtgaaacttcctgctccctacttgcacctttatctttagcttgactcttggcacagattcctgctggaagcctcccctatggcacctatgataaccaaggcttgctctaagagcctcttgccacttagtgcaaattagggtttgtccccaggcttcccaatccgatagatagattccttatactctgtaataaagttgtgctgtttcacccaaatttgtctcttggagggctgtctgtattgtacccaatgctgtccaaaccctgttccctgcttctgctcccttcactctcacagacccaaggaggaaacagaactacatgtcccaactgtggatgatgtctgccgccataatcattgttttgaagaccattctaaaacagctccataaatatccatgctgagagaaattccaataatcacatgaactatttattttctaaaaaaaaaaaaaaaaaaaaatgaaagcaaaccagatccaatatgaacggtcactgtagctggataacatttttagtggttgtttcctgtgtagatttagtggctttgaactgaaacagcctagaagagcaaggagagcctctgtcagggactgtgatgacaagtggcttcatggtgatgaagacatgatggatatcaaagttgtatgggaaaatgaaaatgacatcaagcgcagacatggagagagcatctgtttcttaatagcatttgtaaggtaaagtctacccatagacatttgactatttcagatgtatctggatattattcaagatcaataatttttaaattcaattaggaagaaatacaagtcttcccttcaggtacataagcttgttttgtgggtgcctttaacttgcagaaagtaactctgtgtccatttgctatgttccactttacacaccaggcattattgtggtgcattcaaatgttgctccatgtgcattttagcagtggcaggaccccatttctcttccctcttcctttgtagatacacgctaagtcactgtgggcagaagaacacatgttgatttgaatgtctgaaactgtccctggtgacaacagccagatttagcaactaaaatatggaatgcttatatttggtgtgcgtaaaaatagtcattgctgcccggcattggtggcacacacctttaatcccagcactctggaggcagaggcaggtggatctctgtgagttcgaggccagcctgggctccagagcaagtgccaggataggctccaaagctatacagagaaaccctgtctcaaaaaataaaaaaacaaagcaaaacgaaaaaaaatagtcattgctttgaaactagatcaaaatgaaaagccctgtattttacctgacaaacattccttggagtaaattaagaagttttttcatgtttaaaatgaatgaatttggaaaagtgttcatggcaatttcagtatatgactaagtggtagcagtactttctggattactaagcactgagaaacgtgagcaggctcagagtgtcatgttgacagcttctcctgtcttgtctctgcaatgccaccactgatgtcctcatttcctgctttcccccgatagagctatctgaggcaaaaactgcatgaaggatatgtgtcagacagggcatgtgtgcagggtgctggaaagaactgtctggggagagatacccagttcatcagggaaacattcctgggaggggtgttccagacacaaattaaaaaatcataaatcaagaaatcccccttatcaaaccttaccagccttctagaaaaggttttatttttttccttttcttttttcttttttttccaaggggtaacacatgggacctggagttattcctgcgtgacattagtgcccattaccattctgcatacattatcaacatcacacaagggtcatggtgagccctgcagtgcaaattttcataaggcgatttattcccaccccatggacacttagacctcctccatgtgtgggagcaaagtgcatttcagtgataaatagtagaaaaagtggtaacaagttctgtatcctcccaagagcagacctttgtagatctctctctctctctctctctctctctctctctctctctctctccaactctctctctctctctccatctctccctcttctcctttcctctcctctcttctctctcatccctggcatcaccacaaaagtcaccagtaggttgttattggttaactagccaaaacccaacaggtcgagtgaccttttattttattttttttcttttctacagtgcaagccaaagtacttaacttcaatcacattctcgttacccccatccccccagtagaaacacggcagcaaacactaatatggtggtaatttcatattgtttctgcttatgaatttgtctttcccttattaatcatccaataaagtactgacactgcagaatcctgacatggctcaacaaaccatggactaaggacagtagcaccctcaaggaagaggccacctccaagctggagaagcacaaagcttttattaacaccagaggcccattagagtgctctgtgttcaccttcagtggagcaataaatgaaggaagctgcacgggagaggactcctactgtctttgtgctggtaatgcccagccaagctgtagtcatgttgtaacgcttgtaagaaacagatgttccttccctgacaaatctcctttcctgatttattattcatttgctcaaatcacaatggaaagtctttggcccattaattaaattccaagcaaaataaaatttgcagcagaactcattactggtaaatgactttgacacttcatcagatttgaaggtaaaacaggcgactttaggaagtgaaaggtggagggagcctagcccttttctgcaaccacggcaagatgataaagattgtgatgaaatttttatgttaagtactgatcttggaaagttcaatttccccctgcgtctcccccagcctcccgatgtccccgccaagggccactcctgctatctttcaagggacggtctggaggagacatgggcatttcaaacatgcttatgtatatgtgtgtcagatctcattccaagcacaaaagcacatactattttcttttttcaacaggcagagaaacttggcgtgccgtgtatttgacgtatcgctttttggataaaggtctgggggatatctaactgctgtgatattcagcttgataaaggatttaaaatgagttgagaaaggagcagaaggagttttgacattctggctcaaacatacaaaaatattagctaaagagaggcaaaaatgtaaaaaaaaaaaaaaaatgaatttcaaagcatgcctgacttatataccagatcacaggaaacctcaacggagaggggcatggtaaatgcttccaaaagaagggcagaaagcttggttttctgcagaaatagaatgcaccactgaagtcgggatttggaagaagagggaaacatgaccagctgtacagtgaagtttgcttctggggagaggggattctgcttctctttaagtcatgccagctttggtgtgaagccaagatgaaacctgtcttattccccagattctaatgccctttccccaagccaattcaggggtgacatccccccatgtgaagcctacacccagagcatcaagatgaaagaatttgttttcagaggttggctcttaaaactatgccaccagataagaaacatccaacaaagccgtattgaaagtgtccatgttacaaatagcggacatatttccccactcagtgccaagcatccatttctgaactgaggatctgccacaaacattaagtgaccactcagccacttgaaccatatttactctgacccctatgagaaaacgtgaggtacaaaggaaaaaaaaatggtgacaaactttaagcaaaatgttacctatttaacagtttacacgtgtaatacccattttgtgaaaatttaaacaaagtaaagtcaataccagacataggtgaatttttaaatatagtattttattaattctctgataatatcatacaatgtattttgatcatattcattatccactcatcagatctacccctgccttcctacttcaccaagttctccaatttattatttacaaatcgcattaagtccaatgtgtaccacttttgggtgtgataagctgccacatgctcacatccccacacctgccgccatgtcttccttaccaagatggattgcttcccctcaaactgtgagccagaatccacctttccgcttatcagtttctccttctggatgctttactgcaacaatgagaaaagtcattcatgcaagcaaatcttcaaaacatagacaccttatgtaaggtgggcccaagacagagaatcagtgtatccatgttgcttttttgttgttgttcacgttgcctttcttctttgggcagaggcatttacaataaatattcaggagaggactaagttgtagcagggttgaaacgtccactttctcctgtggatctgatgcagggagtcccgagaggtacaggctgtcctaaatggggtctgcctgcggcaggaggctgtgtagagagaaattcctggcagctgaatgtaggcctggtacaggagtctgtgcaggagcctggagcatggtttctgggtggtacaggaaggtcaggttcctcatttgctgcaggaagccatgtggactgggggccagtggcctgtctcctggaatctagttcctaggtggaatatgacaggccatcttcagcaggggaatcccccacggatagcctagttataggatagactagccttggcaggggaatctgcctccctgccacttgagagtaaaagccctatttcccttgaaagatttttcttatgaatctacactcgccttatctctctacaagcaatcctccatatcctcagtttcaattccgtttacttggtttgagataaaaatactaacgggaaacaaacaaaaagccagctgtggtggtgcacacatgtaatcctggcatgccgggggctgaggcaggaagagtgcaaattcaaagccaggctaggctacagcaccctgctttaaaaaaaatgaaaatattaaaaaacgaaaccaaaccaaaataaaacaaaaatccgtttgtggaaataacacaatgaaggagagaaagccagcagggcgttgtgatgagtaaagatggatgctggagcttgtggtcttcttctgaaacgcggcctctgtctgggccacgggagggcccttctggtccaatgtatgaaaggcaacataggacaactgtctcagtgcgggacatgtgagggcccctttggtctaatgtgctatgacacaggaccttacaaaagttaaattaaaatctgagtctaaaatgttaaaaatcaacttagaaatgtaccagagcttctcctcaataaggcatcagagcagtcgcttcgtttcctgccggctgactccagcaacactcaccgctcacacactcctgtatgaactctggacaaagtgacttagaatcggtgacaattttagaaatattttcttatttgcttttgggtttttgagacaatgtctcactttgtagcccaggctaacccagaactcactgtgtagaccaggctggccttgaactttcagcaatcctctgcctggcgttgaagacacccacccaccaccacagcgggcatcggtgatatgcgttttagaccatggttggcattttgcaaccaaaaaccaaatcatctatccaattttgctcttatatgatgtgcacatacttcaaacaagggagcccattttaaaaaataattactagttttctagttattgttactaaccagggcagccttccagcttattttcaaaaagatgttataagatgactagttaatatgttaaatatactaaatcataaaatgagcaagactgcatgaatgggacttacctgtgttttccagaggtgaaaactttggaggatacaaggcaatgacatatcttcagagagggggcaatgcatgggcattcctataagtctcattatgttttataattgttctgctgtataaatgaatctctgtgtgtgtgtccctgtcaccccccacacacacacacacgcacatacaacaccacagaaatttaactcagggtctcacacatgctattcaagtgctccaccactgtgctatatcccagcctagttattaatcttttactgcacctactttataaattgaacatgactgtagttccatatgtaaaacaagtagcattctgtgatgaagactgacaggacaagagaacatgagtgtgagcaggtctacattgctgacatccctcaacagtccctgtgagcacagaattcctgtggactcgtgatatgtaagagctcagccatatccaaaataaacaaaaccagcggttgcatttttgattaagtggataagtggcagttatccgaggttgctttgccgctgaggctgggtggcttggaacacaccaagaactcaatggcattctaagatgtgtgtagtggaatttcttgttggctaccaaccagctcccaaaccatgacacggagacttggttttggttatgaatgcctggccttatcttatgctcatgtcttgctagctcttacaacttaactgtttctcttcagctacatttgcctcagggattttacctttctttccttctgcatctcttactttcactgcttctaaaggctggctggctggcagctgcctggcttttggcctcaggtgtgtccctattgttcttcattctctcctccttcttctctctagagcctagatttctcctcctacttagtctctgcctgccagccctgcctgttcctctctcacctagctattggctgttcagcttttgattagaccaatcaggtgccttaggcaggaaaggagaaacagatgcaacacatttttacataattaaaccaattcagcaaaacaaatgtagcatatctttatatagttaaagtaatttccacagcagatgtgtaagtggctagacaccatagcacatccgagcccgagttaaatccatgcactcctcttaagctgggattaattacatagaagaaaagaaaaggctcccagggtcccttatcacctgcaataagttctgcactcccttcctgtttgtctgtgaactgaagggccagtgttactagaagggacaacttgtgtgttgggctatgaaatataaaatgcataattctgacaattcttcacagggtggaacctactcttctattggaatttaaaactggtattgtatgatacaagggggaaggatgacactgatatcaggaagctgcaatttaaaattttctttaataatgacttttaataacaaataatgatatcaggagggaaggatgacactgatatcaggaagttgcaatttaaaatttacttagaatgacttttaataacaaatgatatcaggacaagtcaagagagactgcacaaaaagggaacgagttttatttttctaaaccttccatgccacttgttttcctgttctttgcaaactggactctacacttccttttttagaaggtttaatatatttaaaacatttacttctatgtatgtgctgcgtgcaagtaccctcagagaacagaactgggtgtcagatccctcaaactagagttctagaaagtgaactacccagtatgcacgctaggaaccaaacgcaggtcccctggaagagcaccaagaatgctcaactgctaagtcatgtctccagacccttgagctctgtcattttgctgggacccttgcaaaaatctagctgccaccaggttacaggtacacaggtactcttgtcgagacggtcaaagcgtgcttttgtgtcctagtagcaagacaatagctgtgtggtgctaaaggcatagcccatgcgctggaactggccccagacaaaatgtcaaaatagagtaactgagggtgtttaagaaaccaccgcaatttaacagtgtgatttttgtgtctgttaaatctggtaatacaaacacccaagcttccattctgtacgcatttgtgtttcagaatctgtctcctggcaactcatgttttattccattttacaaagtttctgcttacagcacgttggaaatgaaaacaagccaacagaaatctgctctttctcagcacttgcgaggtccctgaagaagggttaatcctccattgcagggcatgtatgttttgtgttgcctctgcatgggtgggaccacttgggagacagatgttaaaatctttctaaaaaaagaagttcacaatatttctgttttatagccactctgagaggaattatgacatgatgagaaaattcctggctacctatcgatctatctatctatctatctatctatctatctatctatctatctatctattctctactaatctatcatctacctattaatctattatctatgcatctatcttttattaatctatcatctattaatatacaatctatctatcatctatgtatctattaatctatcatttatctattaatctattatcatctatctacatcttctttgcctgctgtagtgcgttcatgcatgtgcagatacacacgtatgtagaagccaaaggaatgcctagctctcattcctcggatgctgtctcacttgtttttagagatgaattctctcattggtgtggatctcaaggtaggctagactcgctgacccacaatcctcaatgctccatctgtctctgtgtctctgtgctggaataacagatgtgtgccaccaccatatccaggtttttaaaactgggtcctgggaaactgcactcgggtcctcatgcctatgagacaagacatttaccagctgagcatcccctaatgctgtgtctataactccaatgtcacatttcctaaagatcttgctctctttgtgaggtcttcccttactctctctcccttggtgaccactcaactccttgactcctctatgaggaagcattctctctctgtctgggtctttacctttggctatgaacttcacaacttgattcttccaaaggcatcccagaatcattacaaataaaaataaattacccaggaggcaaaggcctcctgcttcttaatttttacaaatacatcccttccttgataccccagcagtcctgaaacatcagtgctaggcaaggcatgtggcttctctggtggtccattgttccatgaggaagcaggggcatccttgttccacgggctttagcatccctcctactgaaaacctgttgtgatgctcactgtgtctcagtagagctgcttccatgcactctgctctgtttctggtctcatcatttctggctcatcctagagaatgagacctcagagatctgatcacatcatgctccacacccttatcacctcgttccctaaaccagtattttaggtcgtccataatctagtctcagctgctcagctctttagaatcccaatccacactctggattccctcctcctctttcttccaaacaccacccatgtttgaatcatgcctgttttgagtggacaccctgagtgagagggacaagacacagggcttgtccccagcacagtggtgctgattgccaatcacagatggaaaggtgggcctgtttcctttagatctgctgcatgacaagagcacaaaagagcaaggtggcttagcgtgctgctcagcctggattaatgacgcggttccatgccctaaagaaggtcaagaaattgccagggtgaataacgactgtttgtgctgagaatttatttgtaacagaaacagcctaaagtcagttggaaagttcacctccacacatgccacttacagttgcttctgtggcttaagacaatgtggaagaaagatgtgtaagaaaactggggatttttaaaatagagtttctgggctctcatgtccagttgttggtgttatgtgtagaacacacaaaagtgatgctggtcatatctgacctcagctttgtcccttctctcctgggttcccggacatcaagtctttttgtcagtctgctggtcctctactaaggaatagttgagctgggattctaaacagtagcatctctctctctctctctctctctctctctctctctctctctctccctcttcctcccccttattttcttcttcacctgttgtcttaccccatgctctgccacacccattgtaagtttatttctgatttcatagtttccttttggctctgcctgatatccggcccccatctttgtgcacacagggaagtgctgtgcccccaaccccagcatgattcttcagggggaatcaatgctgattgggattataagacagttttgctttgtcagctgatgcatgggagccttttgaagggcttcatttaattttggaagaatttcatgtaattttgtcagctggttcatccgagggttaaaagtatgggacagaaggactaaaaatggagaaggaaagataaaatgaagacaaactctaaagtgggtagatatgacagaacgagttaacctgggagaattaaacagagagcaatccctttatgtagatggcatgtggaagaaaaaaataactataaattgatgtttctttcatgctattttgtgctatagcccagccagagctcactccttgaaagccataaaacagtgttcttctgagaaaggaaggtctgtgataggttaattttctaactttcaacaaactctaagtccatctattatttagaactataaactgttcatgagaagcaatcttaaatttaagattgcttctcatgaacagttcacaatagtaaccatgtgacttgtactaaagcaagaaacaaagaggaagaaaagcagggataatttgggatccagtagttgacttcaggtgcgaccttggaaaagtcatgacgcctctggatccaagttttcatatgttaagataataacttggatttctagggaaagcctttgatcagctgtgaaagccagcatgcaacaagatatttttcccagcagccaaatattctctaagactggtaatggctttaggtttttttttttaatgcatggacacaaatattacagataagtcaatgcttaaataaagttttctcctgcacaaaatggcaatgcaaatagcccagctgtgtggagctgaggataatgattctgtcggggtttagacaccctggtcatctaggaaatagagatctgagcagccacagaaacccacacaccctgggcagcatgagcatcccttttacatttaattaggcgaagaaatgccagctgaatgggttaaaaattgccactatttcacagtaagtgattttcttaacccccaagggttcaaattactttggcaggaaaagcaattatgcaattaatagggggaaatctccagagctctgtaatttgcaaagaggtaaaaaggttccactctggcctgcaggggacagctgatctctgaagccattttctttcttcctttcttttttttttttttttctaatttgaccacacccgaaataataagcaaggatattttgagaggcaggaaaacacaacagcctgaataatgtccctgagtatccatgtccccattatattcatgacaggctcatctgagtggtggctgcaatctgaagactaactgtccatttgccagtaccagaggagtttggctttgtaatgcatcgtcctctattccctaggagcctgctttgttagacaaaatgctgagtgaggtgtaaaaatatccctcttgctgtcgtttgcactcccctccatttggagcttttgttgctgcaaacgagaagtgaaggctgctgaaattaagtggtgtcagttcccaatgacactttaatgatagagcgcccagtaaacgacatgagaatgaattccagaacgtccactaaagaaagcacccaccttcaaataccggactgttctgagggtccagggcggcacttgcttcattcataaggggtatagctgacaccatcttttaaatggcctgtgagagaaaggtaagcatatgatatgtccattgcaaaagaattgaaatttggggttatgagcctgaggtcctctcttagtcagagtagcccattgctttaataaaacacactcattaacacatggtattttaagaaagtacagcatgtgtcctgttggtcaagaacatcttttcaaaatactatcaatggaggactggagactgatttatttcattagagaaataaatgcttgctgggactatgcacttggcattctctgtacagttgtgttctgagacagagcacctagatcacatttatgatgccatgttctcattgaaggagaaagatggccccttccctcactgtgggctagaaggggttccggggcaatagcacccctccagaggacctgggcatctgccaacaccacgcaggaaggctgctgaatccaactgaatccaagagaatcaccctgacacacacacacacacacacacacacacacacacacacacacacacacagagagagagagagagagagagagagagagagagagagagagagagagagactcaggtggccagtttcagatttagagtcagggaaagttaaacataagttcaaattctccagccagtgactcagtaatgcttgtgaacaaatctgaaggtctgagttcactcactgggacctgcatgatggaaggaatacacacacacacacacacacacacacacacacacacacacacgcacgcacacatgcatacacacaggcagactaaataaatactcaaataaaaatttaactttaatcccaggcctcagggagggagaggcaggccatctccatgagttcgaggccatcattgtctacagagtaagttctaggacagccagcactacacaaagaaacctcaaaaagaaaaaaaaaaaaagaaaagaaaaaattaaaaaaagaagttggaagtgaattcattataaattttctcataggcattcacctcaatctaaggtttaatatctaagcttacaaagggtaccctaagaaatataaatataaatataaatatatatatgcatataataaatcatagatatatatgtatatagacataggcattgaagtgcttacaatctgtttcacaagatgaagactagtgaaaaaatctagacatgtagttcaaagtgttacatggacacatcagtaacaccagacagaacagacagatcaatggaaagagattacctcagctctgggagggaccaggtcaagaatggcttcctgggggaggtggaggacttgaacaagtggtgggaagcagaatgcagagaaggtagcaaagccagtgaaaagattaaggctgggtgttctggcaagaaaaaaaaatcatggagcaaagttagaaacgggcagtgctatttgatgaagtcttaagaggatggacgagatgccactggctgtgtgcggtgtgtattgcctgcacactgcaagtctcaccatggagcccgggtgggaactcactggtaatcagaagtcaccacagattcgtgagcgttgcgtagatgcgttgtagggattagatgagcaatcacgggaaagtgaactgtgggtagtagacaacagaagcatggtgtgtcacgtgatctctggaggggtgtggctggcgtgctaaacagagtactatggggactggtccggacaacacaaaccagaggctgcgagaactggagctcttgctgccatgcagccacagggtgacaaggaggccccagcactgtgaatgtagaccatatgtcactaggtttccaccaaagctgccatctgccacagtcaccatctgatggatctctgctgcctggacgacgctggccagggacttcctggacaacacattagactgcaaaaacgcagttcacacatgttccctgaaatcacagtgtttttttttttgaaacaagcagatgtggtaccccacccaggaagctgaagaaaacagtgagaccaagtgattgctctgtcatgcccgggcttcatgaacaagaggacactagaattcttatggaaaggcagcattagtatttgtttaaaaaaattaaaaaggctccattgttttaaaatgagtgctcacttttgcaatcagaccataatgaaatatatagagacaattttatttttacatctctgtagaccattagcggtttggcagtgcagcagtttcaactaaatcacactggcctcctttgggttatcctcctgcctcacagccattgatcagcttggggatgatcaaagaaggattagtgtgccatgacttcatggtaactcacaatgtgagcaatatgcttggcaccaaagtgtttatcaaactttgccttttaaaaatagtggtcagcccttcaatgttgacatctgagggatgaggagtgtgccatgaaatactgtcttccagatgtgccatggccgatctactggtgacctcacacagccatggttaaccagcacaagacctacacaagatcaagccaacaagacggtcaacattccagccgtcagcactaacagaacctaaggtcttactgttttaaaaagagaagggaaaggacatgaaggcaggaaagggccatgttaggggatgtctggggggagtgtgccccatccctcggggctcgggtaattcgtgagtccgaggtggatcacgcctgcaaataatgggcggggaaaaaaaaagagggaccaagcagatttccttgtcaaggccaactttattgaaaccaaggggctttttaaagagaaaggaggaagcagagaaaaaggaggtgggggaggaatgaatgttaattgctctcaggcaggtatccggaatcccctgtcttaaggaagtgggggaaggaataggagttagttgcttctcaggccaggtcccggaacctgaggggtgggatgttagggtagctggtggctagctaggcatgggaggtcgccaaggctgacttctgacaggagtgggaaggggaattgggtaagataggatcatgatacattgtataattgtatgaaatgcatgatcagagattaaataaagtatgttttaagatgtgaaaaggttacaagtatttacagtagtaatcttccagctcttttgtaaatttaagagtttcaaaaatgaaaattttagttaaaatatttgcaaagcattagtaagtaatttacttaactttaaggagtaaagggtccccatgcaaactgcttcaagctgtttttgttgaatggtctgttagcttgggtttatttggactcataccaatttttatctcaatgaagtctttgaaattaaaattcatgtgttgtgtactacagtttaaagtaagttttggccttttgcttgcccccaaaccaacatcacaatagagaaaaggagcaaaagattccttgtgctatgatgtttgatcattaaagatttataataatgtcctttatggttttaaaaacatcaaatacatagaagcacatggcacagagatttcgaggctcaaccataggttctgagtatcagtaccttgctctcttgcatgagccgttttttcctattcactgcgcagactcactgagttttgtttctctgtgcctgagtgggactttgaccacagccactctccttctcccccccccaccctattttcacacttctgctccaaatgctgctcatttccaatgtgctcaaagcagagggcagcaaccatgttaaaacctgagcattttgtgttgtcttgaagtttcctccaccaaattaacttagtccattgcctttgcattcagtctcagaatttcaagacacaggtgaaatgtagccagattctttgccaaaaggtaacatcacatgaaaccggtttccttgttctgttagacccccgaaaactcaagtatccggggtctcaggccaggttcgtggtcaccccaatcaccaggcggattcgagagcttgctgcaaactgcacgaggctttattgtaatttaatgaactaaccccatgttagctcgggtctttcacccacccgccatggcagacggctagaaaaagacggctccaacgggctcccaaaagatcttatagggcagcgtaaggggagtgtctaggggtacgcagaggcttacgattggtgtgcttccaggcttggagggcttgccctgtgttgattggtcaactggttgttatggcccataggccctcccagggtggttgctatgctctctacgtcattgtcgtgcgcttgtccgtaaagcacacccacggtcgtaaagcatagcgccaccagctaacttctgattggttccttgtcacaagacatctgactttagtgactaggtcaaggtcatagaagcacatgttcgaccattatggctgccaaaagggaaaccggttccttcagttcctatctgaaacttcaggggcccaggtttttttttttttttttttgaggctcaaatcttctccacattcccctacaaaccagccccaaaggcccaagaagtatatggattgggttagcacagtggtgcttatcgtctcagcaccaagccactgcagccatgaggttcagcctgagtgggggtgcgtgggcttggaaactcctagcaacccaatggcgataaagaccaaacacaggcatcttgtcatctttagagcgctctcagttccatgttgtaaaactagagtctctctttattttagtgtcttcttggctgtttcttaaccatgctcccatggccacaaggaggccatttctctcctcctgacccctctctgctccacggctcctaactctctgttctcacttgttattcacacacctccacccaggtgcaggcctattcaaatgcttagttctgtagagatgcaaactaggagacattccccactgaggccatgctattcaatagcagatcggctattcaatgcagaccggatctcccagttactggaacccctggaaatttcgtaatggaattttcctggctccggacaggtgctccgcttctcgtcccactggggtaaggttggaacttctaataactctactcctagaaacctcaagaccaatagaaggaaaaggaattacccctgctgtcaggtgcatttgttacgtttaggtctcaggggcacgcaatgcacaacagaggcagttcaagcaaggatcagcttattgtggctcgtgacgcaggagctacgatccctcacaggaaggagtggagtggagcccaggcttgcgatgtggctccaaacaggaaacagaggactgaggctagaaacaggccaggccatcccctcaggactaccctccccacagtggcccgtcctcccaaccatgtcccacttctaaaagattctacatcttaaaacagtatctctggcctggggcgaggccgagagcaggcaagagtccaaacgcattagccatcagcctatgggaacattttgtattgaaaccaaatagcagttgcaaacatgttgtgcatggctttcttaattagcagagcctgggagacttaaaagtaggaatatattctcctcccatagtagtgttagacccccggaaaactcaggcctccggggtcccagcccaggacctcggtcaccccaatcaccaggcagattcgaaagcttgctgcaaactgcacgaggctttattgttgtttaacgagctaaccccatgttagctccggtctttcacccacccgccatggggatggctagcaaagacagttcgaaccggctgcatagagatcttgtagggcagcgtaaggggagtgtctaggggtatgcacaggctcaggattggtgtgcctccaggcttggagggcttgccctctgttgattggccaattggttgttatggcccataggccctcccagggtggttgctatgctctgcatgtcattgctgtgcacttgtccgtaaagcacacccagagccgtaaagcatagcgccaccagctaacttctgattggttccttgccacgaggcaggcgtctgacttctagtgactaggacaaggtcatggcaagcttgtgttactgtcatggctaccaaaatggctgccaaaagctggttccttcagtagcatacacaagtgagactctgaggtgggggcagggtcgtgtcctcctggaaagctctggcaagagtccttataggatcctttctaaggccctggtagctgctgtcaacccctcctttcataatcattcattcattttcctcccctgttcacattagtgaacatcccatctgtgtcaaaaattctaattgacctacagggcctccatatccacttctgacccaagaaagtgaagtcatgagattgcgtcatagtacaagttcacagctgaaaggaaatgcctttgtgggtagagcaagccgtgcccagggccgtgggagctgagcctgtcacatcacaggtgtgatgagcatgcagatgaagagctcgctgcaacagagaccaaccacaatacctaattttgttgacacatacataggtgttaataatcacagaaatgttcatgtatgtgtatgcatgtgtatgtacatacgtgttcatcaacaggcacacacatttggcttgagattgtattatatgacttcaatagaacatccgtcttagtaatgtgaggacaaccatgctttaataaaactgatttatattcaattaatagtgaacttagatggggtagaaattgctccatgatctagtggttatctacatatgaatcaatctaatcacatatttcccaggtaagaatattgagctaaaaagaattcaattggcttagtgcaaggccttctaatatactgacaaaaaggccagattattttagcctattttaatcctctcattgaaataaaatactgctacctaatatttgttcagatacatttataaggaattctctgtgggcttcagtgtgtgtgtgtgtgtgtgtgtgtgtgtgtgtgtgtgtatgtgtgtgtgtatatgtgtgtgtgtatatgtgtgtgtttgtttgtgtgtgtgtgtatgtatgcgtatgtgtgtgtatgtgtgtgtatgtgtgtatatgtgtatgtgtgtgtgtgtatgtgtgtgtgtatatgtatgtgtgtgtatgtgtatgtgtatgtgtttgtgtttgtgtatgtgtgtgtatgtgtgtgtgtatgtgtgtatgtatgtgtgtgtatgtgtgtgtgtatatgtatgtgtgtgtatgtgtgtttgtgtgtatgtgtgtttgtgtgtatgtgtatgtgtgtatacatgtgtgtatgtgtgtgtgtgtatgtatgcgtatgtgtgtgtgtatgtgtgtgtatgtgtgtgtgtgtatgtatgcgtatgtgtgtgtgtatgtgtgtgtatgtgtgtgtatgtgtgtgtgtgtatgtgtatgtgtgtgtgtatgtgtatgtgtgtgtgtgtatgtatgtgtgtgtatgtgtgtgtatgtgtgtgtatgtgtgtgtatgtgtgtgtgtgtatgtatgtgtgtatgtgcgtgtgtgtgtgtgtgtgtgtgtgtgtgtgtgcatgcacacacttgatcgagctaaaaagaattcaattggcttagtgcaaggccttctaatatactgacaaaaaggccagattattttagcctattttaatcctctcattgaaataaaatactgctacctaatatttgttcagatacatttataaggaattctctgtgggcttcagtgtgtgtgtgtgtgtgtgtgtgtgtatgtgttcctacatttgactagacttgacaaacagtcctgtgaatgagtgagtggggcaaacagtctataaggatgaaggaagctggttccctgcagcagtccagagcatcgcacatagactccagcttcctgcaggtccagtgtatcctccaagtgcctattcatcctgtcacacagggataccagacagaacatggatatactcttgctgaacatggcacaccaaacagctcaccaacctcgcatagtggaaagttgccttttccctgtgtcttgagtctattagagctcagaagctgtgatctatgttgaatttaaagtgtccttttgctagctcatactgtaggcaaaaatgttgattgatgacagtcatgctacaataaaaagtcaggtggattcccatgaatgaactgaacaaaggaacaccagacatgctcacatggacaggggttgggtggaggggaaccggggaggccccaaccctatataaaggcaactgaggaatgctgtaagtagaaagaaatagtcctccccagggaagagcacaccaattggtcatccgataccaaatggtcagccctaaagtcatacacatacaagttacactatacagactgagcaggttctatttatatgcttaggaacatatacatatttacaggtaataacaattgattttaaaaagaggccatgaatttgaaagagagaaaggaggagtacatgggggctgggtcagtaggagactcatcatttcctatgggttgctgggactgacagcatgtgattgcactcataggtgaactttaaagtataaaggtcaatgtggccttttctgtctatcaatgtatcctgtaaactttcctactgatcatgaaccatgaggaacttctagcagataaaaattacataattaaaatgtaaagccttcaagatatgttgccacaattaattctaagtatgttgtagagttttgatttcaggaactatattaaaatgaagaaatcttcaaagtttggcacattctgcactcatatatttcatattgtgagcttggcatttatatttctttgtgaaataaagaaaaagattgagattaaaattggacctggattgaatcccttcaaactcattaccgtaggaagatccaaaatctagtgcttagtgaccagctattgagacaatcattttcctgcctttcacaaagttgggttgagtctcagtgtcagggcaaactttagaaagccaagggcaggagccacgtaggatttaatgttctggaaaaccaaactacaagcagggattgattaaaaaccagcaaaaaaaatctttcaatacttctgcttccgatttttgagaacacaacccttccccattcgcctagtgtctttaaccttcatattgtccttcctccaacagccccacgccattagaagatacatgtttacttagagaaatctaatttgtgttttgttaatgtgtgctgtctttacttgctgtattacattaaatgagaaatagagttaccaaaaaaatcatctcacttgaaatcattcataagcgatcaacaagggaatccatatatgaatttccattttgcttcataaccatccacagtgctaacttgacctttaccggaacagaactataattgcagttaagattatataatttacaataacaacaaaaaattactttggaggcactgctactgagcccaaatgtctcccagccattaagtatatcatccatcttgagaagaaaattgttcttatccacatcgacgtttttaacataaactgtagtactctctgttggcacctttttacgtacccattaatctcaatagtaaagtctcgggctcacccacctagtatctgacgtctagatgtcactattgtgtaccataaaaattgtatattcatgaactccatttgttttatgtccttctctctgtcaaagccttccaagaagcatatgcttcgctctgtggagaataaaatcaaatttgtctgtcttgtcatattgtcatcaaactgatagtatcacaattagattaacattttgtgaagaagctgaagggagagaatgaaacagggacacattataataaaatccacttaaccctttcagccacacagccctgtccctcctgcacccggaggcaaagaaggcaataaaactctcaagtaggcgacactggtaaattattatgatctatgttagaatcaaataggtcagttactaggcctgcgaggtacattttttgtttgaaggggccattaagattttgtgacaacaattgaaagaagtaagacacttccaggggttcttgaaaggagtccgtctgggatggagttgtcgagaactggtcagtgtggccatggacactgcttgcccctgcatgcaatacgctcactcactgaagttctgcctccaaactgcaggcaatgtcaggcactgcaatcgggagctcctacaaaatttactgttacaatgtctatatgaaagagatttttattttcattattttggcagtttcaaaaagtaccgaggctcaacttgaaaactgtttgaggagagacaaagcctgagttaagactaggttgagggggctaaggagatagctcagacagtaaagacctaagtatgtgcatgaacacacacacacacacccacacacacacacacacacacacacacacacacacacacacacacacactcacagtgggtggaactgaataacaattctagagttaatcatcctgccaagtttttcttctccaaaaaggctcacatatgcgtacaaagagacaaattggaaattatttttagtttttgttcttgcatggaaataagagaccccccagatctccccccacagtctgttttcactgtgggctgtcagggggcaggcataaccattgtttcattactgagaagcatgctgggtgagaggtatcacagcccctggggctgccatgggcctcctggtttgcaatgatgttgggagcaaggtgacctcccatggcctcccacaaaagagacaacacttctgtcattaggaatcaccagtctcagagggcagccacaccccagtcactgccatagagaatcagagaacagtcatgcgcaatcagcctctgtggtctaaagaatggtccgactcttctccattcctgaatccctttccttcctcaagtcttctaataagcagtgcaaacaagcagtgatttgtttaataagcaatttggcatcaactcaaccaccacatggagttactcactaatttataccaacccactgtcaccacctctttagaatcagtccttaagactgaggtaaaatacagttcttgcttcaaaggaaaaaccatgggttggggatatagactcaggttgttctggatggcatgttccacagcagaagtgactacattctctctctgtctctgtctctgtctctctgtctctgtctctgtctctctctctctctctctctctctctctctctctctctctctctctccctctcccttccccctctcccatatgtgttgcgtgcatgtgtgcatgcacaggagtgtacttgtcatcatgtacacatagaagtcagaggtcagcttttaggagacccctccttgcagtgactgaaatcaggtcaccagacttttatccactgaaccatcttctggtcccacatgaaaattttactctcacagaataaattggaaatgccactggcaagtacataaggtaggcagattacagacaatgtgaggaaactctgctataggttacaaggttacagatactacccgaggacatccttagttttagagttggtggaagtcagtggttcactaggttaatacattccaaagcttttgttggtgttaggtccaatgcaaaggctgatggtaagtgactgttgcaaagctagcctaagacaatcctggctctcaacctttaatatcccaacactccacaacctcaacgtgctagtcagtcaatcagcctgcagaagcaccaacacgtacaggtgcttcttggggcttcagttttcactgcctgttcccacaggcctacagctacttccctgatctcaacagctacctcttcatgtcttcatgtatctgcatcccaaccacacacacacacacacacacacacacacacacacacattcacacacacacacacacacacacacacagagagagagagagagagagagagagagactcagatacatgtatacttacttctgcattcacacacacagacacacatacacacacacacacacacacacacacacacacacacacacacacagagagagagagagagagagagagagactcacatacatgtatacttacttctgcatcccaacacacacacacacagacacacttctacttcccatcacacacacaccttcttcaaatgtccaactggttccctgtacaagctctgacttctctatactcagccccagcacctgtccttagggacacctcactgaaccttcttcttggccgttgtatcatctagttatgcgttccaaataatgttgactacttgcatttatttaggttctaagacttccagagtataatgtttgactagttcttttcctaatagtacaatggcaattattgagcatacagggagttctcattagagcagaataaagaacaagtcaatgcttgaagagtcttttaagattcggagtgtcagatgttcacagaggaaaaaacattgcgaatttcagttgtctaacttttaatatgagaattcatgtcacaccttgatttaaggaatatatggagaaaaaactcattttcattctcagaagaatgacaactttggtgttatccaacaatagtaatgccacaggacaatcaccatcactaaatgactttgacggtgaacgtactggtccggggaggagatttatatatactgcctgggtactggcacatagcattcagtcttggctttaaactctttatattaaactaagtattggataagaaatacagtaattgtatttaaggtacttggaatttactacaaaatatcgacaaattaactcatttgatgctggtaggaaacttttagatttggtgttatattatccccacttcatggatgagaaaactaggtctggatgggcctgagggtaagtagctcatactctgagatggtgtaaatctagaattaattacctgctggatcacagaagcaggtttcaacagagctcagtagactggaataatggatgaaaaattcagttataaaacatgggaagtcttggaagacatttataaagagtaaatacttccattaaagacttattaaacaccagaaacagtggtacttcttgacatcagggaaaatctggcaggcttaaacttactgactggttctcaggagccaggtagatttttaagatcactctcttcttggagagggaagtcaacagtctggcaccaaaagtatcagagatttctgcacatagaatggcagaggccaatccaactgccattagaacatctcagtgctttattctagggtaatctgccaaatgcctctcccgtccttcaacttggtcatttatcatcgttaatgatgcaggtcggagaccagcaagaacagctttgtgggaaccacaggattttttgctcagttagtgccttgcaggtggcgtctccccatggaagacagaacaggcccatctacacaagtttaacaccaaatcatcataaacattcacaccactgcaatgggaacattttgagtgattgctgactaattatacaaagttgtggcaattctctactccatttctcatgaagagaaataggctagaaaataaatatgtagagtgttcttcaggtagagaagcacgttttagaatatgattcttatcaccacatatggtctacttgatcattatttttaaaattatttttattttatcttcattggtgttttgcctgcatgtatgtctgtatgaaggtgtaagaagccctggaactgaagttccagacaggtgtgagctgtagtgtgggtgctgggaattgaacctgggtcctctggaagagcagacaatgctctcaaacgctgagccatccatctctccagcccctgctttatcattcttagtgaagtctcctgaagagttataacaatacagaaagagttctacaatgaattttatgattaggaggctttaaagtggtgcttctgaggtgcccaccaaggtgaaggcggggtgaagatggtttgtacaaaaagtcccagagttatgcataaggggactggctttagatagaactgcaaatagagccccatgcttaaagtccttgttaaaaataatagatatcctgacagacacaatcaagaagaggcttttagctgcaggagacaatatttagagacaaacggtggcaacttcaatagtcagaatcaccatcaactctgagatttgctaggaagagtgcatgtgcaggttttggccaccccttcaatccaatcagacatatggaagattttaaaggattatgtcacatacaagcctatcagaaaaatttttgagagcttactggtgagcctgactcacctctggctggaccataaataagctccctggccagggtcactgcaggaaatctaagagaggacagaacaccatagatcctggaggtttaggaagtgtacatgccccacattgcaaactctctggagttccaaggtaaagcacctcggagccacttgcttctatggagacataaattctttgagctgtgagggaagtctaaaacaaccacatgcaaaagaaatggactacagagactcaagtacattattgaccagtaacttgtgatgtcctaaggttataggtaaaaaagctaaaggctgtaacagaggcaaaaatctgagctgcaacatccttgtgggtactacagagaaacagatcttaaagaggtcttccaacaaatcaattaaaaacataagcagctgtacaaaaaccaaccagactcagagggataaaatcaacacacagttgataaaatatattacatgaaatactcagccttccactaaaagataggatccatacagaggaccggaagtttggctcatgtcagcaatggcttatttattatagttagtgttccttactaatgttaataataggggaaacaggtgtgggaaatcactgtgctgtctgcgatgtttctgtgtcttaaatgcatttcataatgaaacatttactttccaaaaatctaaatagaattacagaattgaaaattacagtaatctaaatgaaaaggttatctcaaaggagggctcatcattatgaattgtcagaaagaagaatcaatgagcttgtagaccaatggagactatgcaatctgaagaacacagagcaaaaatgaaatttgcaaaccttagggaactgcaaaacaccatgagatacagccaggtgggtttcacagaagtattagaagagagaaatcaggaacatggaaaaacgatttggtgaaacaatggctataaacttcccaatttaagtagaaaatagtagtctacacattcagaaggctcaaccagcatgtgcttcaagtagaacaacctcagggaaatcgtagataatacagaaaagagttgttggaagtcagagatcatggtaggagaaatgaaaggaaaacaatgtctccacgcaagaaaagcacaaaggacacaagatctgacctccatcagagcagtggaggccaggggtcagagaaaggaagtctgtcaagaagtgaaccaaactcccatcaccaggatcgttatccagcaaagctatcttcccaaagggaaaataaagaccttgcctgtaggggaacctgtagccacacctgcttaggggctggctacaggtctgcctgaccacgcctgcgagagcgtggttagggtgatgtagagtgggaggcagtcaagtggctggtcacttttgcttttgctttttggcttgcagtactgaccgctgccacagcggctggctaggtcgctctgtaagtaaggcttttccctattaaatacccttatatttctacttggctctgtattggtaatttcccactataatcgccacataaacaaagcccaagcacccattgcaaatagaacttgtacttttaaaaaagcagtacaagagagaaagatgccattcgacagagttcaagtggaggggtttttaattgggaaagggatcataaaaatgggaaagagaaaggggaggaggggagatgagactccaggtacaggagcagtgggagagaggcagagagacagagacagaagaagagagagagaggagatgagaggtgggcagggcccttttaaaagggaacatagtgagtgaatgtgcacaggtggtgctcttagtggcagcagctgagggcgtgtcctgttagaaccccaaggacaggccagtgcagatgcctgaaaactaacagaactccctggaaggaggttctaaaggtatgtcttcaggttgaaagcaacaccactcagtaatttgaacccatattaaaacaaaaacaaagatctgtgataaagacaactatgtgtttatgtaatgataagggacaggacatagaatttactatattttcacatatgaatttgtgatctttcttctaccatcttcaagaacagccatattaaacaataattataacaatgctgtatacacttgctatatatatatatatatatatatatatatatatgtaatgaaattatatctgcacatttggtagtatcataatcctatgtaggaagatgaggaatgtgtggcatcctggagtcacattttcagtctcgttagaaataaatcagtatagatatggtaacatgtatactacttattagaggaaacactaaaaaataaaaacaaactgacctgtaggatctgtggtgataaactttaactttatgctgcattaaatactgtttctccttttgttttgaacagctcagcaacaagtttgctcactgactatctaaacagcatcagttttgtgcttgttgagtttttctgttgtcttatattttgctgattttcattcttagctttctgacgtttcggctagttacttaggatttgattttcatgtctttttttttttttttgctttcaacttagggtgccagtttagatagtggttttaggatgtttactcagtttcagcattttaaagcaaaacccctcctctaaacacttctcagtgtgcccttcctaactcatttgcttttatatcattcataaatcctctttctaacttctcctgttatttcttttttggactgagagttacttagaagaatatgttatctagttacaaattttgggaggttatcctggtatttattatcaataattagctagtaagggtatgagtataattggtatgattttgctgacacatttaatggccttgtatacaatttatcttagtgaaaattatgcattctttagtgaatagctatacttataagtggcttagattgcataaattgagaatatctcttaagtctgcattttcatagatgtgttcacctattagttactgggaaaggacactaaaatcttcaactctgaggtgaatcttgtttttctgtgccactttgctttatgtctttggaaggtttgttattaggtccgtacacattggaaactgctgtcttctaggtgagttgtgtcctcattgtgacgctcactgcctctgagactggtttctattacaatgttttctacccctttgctttcagtctggttgtgtcttaatttctgaaatgtttctgtgtagtaatgaatagatcagtcttcttttattgtctgataattgcctcttggaacgagagtgcttattccacttgcatataacgtgcaacaatataagtatatataattttatatttttaccatcttgttatggactatattcttacttgctacctctttttgagtcattttatatcaatcaaatagtattttagtattccattctatccactccattgttttattttatactgatttctctagagatttcaattcccatctttatttgtagtctacctggacttgatattactgactgcatatgtaagttagggatcttaaagaccatatttccaatcgggttcttccaaaattctgtgcaattgttgttgtatatattacccatatatgttctaagccttacattgtgatgttattctgttataaatacactacttaattttaaggattttgacacgaagaaaaattgatatcataattacttgattacccacttctgttttcatctctccttttcttacgatattccattctacctcaagagccatgcaaaagcagtgtacattgcaacacaggtcatctgatgactaagactcagcttccacactcaaaaaatatcaactctttgtgttcatttatattttttaattaaaaattttcatataatatattttgatactattctttcccctcccaagtccctacttaaccaacttcatgttctttctctctctctctctctctctctctctctctctctctctctctctaataaaaaccaaaaaatgaaaatcaaaacaaacacaaaaacaataagacaaaaagtacaaaaacaatcccaaaggagtgagaaaaacataccgtccattttgtggtggccaactactccttagtatgtggcctcctctaaagtgtagttgtgcacccaaaatatcaccccaccgaggaaaactgatgcgccacaattaagtctgaatatagggcgaaagcttggagatttaattaaaagcagagtggtccggttgcttgcgctaagagaaaatgtgtgcatctatgtttttttgcagggagggagcagccttatatacagacttatggcacagtggaaaaaccccaggtgtaagagctcctgtttttgatgctagtggggcaaggcccaggctgtaatccaggactagaaaacaggatgcacctgtggttatcgactcacggagaccccatgggagctggggcccaacatctctcccaacactgagttctttcttccagcagttatcaatagtgactagattattggtacaggatgggacttggtgttcacttcctcttttctgtacttggattttgtctggtttcaatacatgcaggtcttgtgtgtgccatcacagcctctgtaagttgacatgtgtatcagtcctgttgtgtctagtaggtgccttttcttggagtcatccatcgcctctcactcttagagtcttcccaccttttcttccacatagatctctcagccttgaggggaagggtttgatgaagacaccccacttaaggctgagtgttccaaagtctctcactgtttatgcattgtctatgagtgtatgttaattaccatctactataagaagaaacttctgttttgttgttgttgtttgtgttttttagacagggtttccctgtgtaatagcccaagctgtcctggaactacctctgtagaccaggctggccttgaactcacagagtgatcttcttgcctctgcctcccaagtgctgggatcaaaggcacacaccaccaccacccagccaagaagaagcttctatgatgagggttgagtgatgtactcatatgggcacagtaatatgccattaggagtcaatttattgctatgttccttcagcagaataacagcagtaggttatcccctagtgcgcatggcctgtctattattagattcttggcttctttagtagtgtcacatatgagttccattttaattcccatcaaaaagtggttggctgctttcctaactcttgtgtcactatcacaccggtccattttggaggcagatcacttgttgcagtccatagggtctgtagctgggtgatattaatgattactcttctcctctattatagagtgccttccagaatcacaaactccagtcagtaggtgctggatcttctaactcaattactctgtgtttgacgacataagaaagtggtgtacttagcaataggactctactatcaggttgtggagggtgcccagactagtggcaatagcctgtgatctttgggggaatctgtgggacacctttggccaatgactcaacaaaatgtaacccattcctagcacagggggttttacatggtagcataagacatctagaaggggcattatctccctctttatatggtgactccatttttcatgtatgtgtatattttaggaagtttctacagtagtagttttccatatagcttttccaaggacctttggtgttagttgcccctccccatatttccttctttactctgctctcccacactcccattccaacttcccctttatctctttgtaacactgtagtctgtttatccttgcctgggcaatcgccttctcttccctggtcctgtactagctacctaagtagcttcctgtggttattctaattaaaatacacctatctaaaacttaaaaaaactagcatctgtatgtaagagaaaacctgtaatatctgtcttttggggtttgaattacctcatttagggtgattgtttacatctgcatccatttaccagaaaaaaaaaaaaacatttctcaacagctgaataatgttccatttataaacataccacaccttcattatccattcaccagttggtgaacagctaggcttttcacaattcctggctattattaattgaacagcaatgaacatggaagtgctaagatgtatatccatttaggtgtatgctagagggtgataaacctggatctttgttagatcagttttccaaggatccttcatgctgatttccacagtggcggtaccggtttgcagtcccaccaccagtgaaaagtgttccccatccctggatttgtagcacatatcttcttttgtctgcattgtgtctcaggaattttccatcactctcatgactcctttcctgcacttactgtgtagtgataagccaggacatgtttttatttggttatttgtgtttttctctgttttcttacttttcaatgtccaggatcaagcccagggccttgtatatacaaagcaaatgatctactactgagaaacataaccagctctggtatgtggaaagtttggcaagtggttctcctggagaaaaaaaagacccctggttgatagcgtccaccaactcccattgtgtgagctccctgtgctttgatttttctgttagactctctctctctctctctctctctctctctctctctctctctctctctctctcacacacacacacacacacacacacacacacacacaaatacaacttgctcagttcatttagtgtgacatgtgtgtatatgatttaaggattgaacaattggtgtttgacaaccagttaggggattcatccttgtggaagactatataaatctatataaatttgagaggggggagggagagggggagagagagggagagggagagggagagggagagggagagggagagagagagagagagagtgtgtgtgtaaatggttcacaatgccaatggaggtcagagaacagtttggaggaatcgattctcttttccaccatgtgggtcctggagatcaatctccagaattcctttttcagaaccatgtcatctcatttgtccaacaaagacatttttattcatacgcagagcttcatgttcaaaatcattccttttaattttttaggtaattttttcctattcaaatgaaaatactcattatctttaaatcttgacagtttttaacctaaggatattttaaaggtattttccagacaagagaaagaagataacatacagttggaggtgattgggagctgagaagaaaagaaccaggaagacacaagaccaaccctaacaactcagttttgttccggttgtcattggttaccatggcatgtttactgtaggtcctgaagttgggaaatttacttgatgaaaatcattcaattacttcaaggaaatggctctgaaatcacagtccattcttttctggtcattgataattatgtggtaatcatcatcttaactcaagtccagaaacaaactcacagctttaggaatacttgaagggcttgcagctgcagtgattacagggggtcgtgaggataggggaatgttgctgaaagggtaactagaaaaatcagtgatgtaagagaggaaaaaattctgtgtttggataatcaaatcaaattacatcctattcactctaatttttttttctgaacaacccaaaattgtcaggcaaagcaaacactaatcagatgtgttgaaagcatggtgttcactggagaagttcattctaagcaggagacttgggcaccagtctcctagattaagccagaatgcaacaaggaggtatcataggtgttggatggggccagcaagatggcgacgcagtgggtaaaagagcttgctgaacaagtgtgaaacctgagacccatccctgaatcccagataaaggtggacagagacaactgactccacaaggttgtcctctgctctccacatatagaccatagcatgtatacccccaacacatacacacacacacacacacacacacacacacacacacacacgaacacacacacacacacacacacacacacacacacacacacacacgccatatacaaacacataaaatgataaaaaaataataaaaagcaatgcaaaaaaacaaaacaccgccaacacacaaatttctacatatggaatagatcaaatgactgatgcatgttctagcttttccatatttttctttgcaaacactaagctcaaaatcaaacttgtgtattccagatggtcctatgtgtgttgtgtgtctgtgcgtgtgcatatatttcaagtgtatctgcatgtatgtgtgcacgcgaaatattgcccaagaagtgctctagggtaggaaatggccattggttctgtatccttaggaactaaggaggggtgaacttgaagtttttgaggaaagctagagtcggaaggttccagtctagatgagttttgttgatatactaagcattggtaaaatgagcagcatgatgtctgggagacattccagctagaagtgagtgttacacaagcatgaggagatgagttcagttccgtctaataaaaagcttggtgtgcactttactaaaccagcataatccataactacatcctaaatatctgtccttcaacctgcaaataactgtatcaaggaaacttagttttgcaaaatggaggccattacataaaaccaccaccaatcaaattgcagaattgtggagctctatcccaactgacacttctacaagacaattcctgcaccctgggtgctcagggaacaatgcagaagagggacaggaagattctaagagccagaggaccagggagtttcctgtgaaatcctgtctctggccacatgagaaactacacccataaagtctcaccaacaggataacaataggctggggagctggggttgtcagtgatgggaggaagcccaggaggcctcaatcctacacagagaactacagccatctaaggaaagcaggagacgaaaatagtcttcccaggaaagagaacaagaattgattattcaataccaactggtcaaccttgaaaatacatacttacaagtaatattgaacagactgaaaaggttgtgtttatatatttaggaacacacacaatatatatatatatatgacaacaattaatgaaaatgaaagtcatgaatttgaaagagagcaaggaagggcatatgggaggatttggataaggaaggaaaggaaaagatgaaacgaggtaattatattataatctcaaacatgttaaaaaaaaaagtttgggtggcagtgcctgcctgggctcccagcactgggaggcagggacagatggattctggaggcttgctgtcctgccatacaggctgaatcggtagcatggggccagtaagatccaggtgaaccacaattgaagaagaatatctgagattgacctctggcctccacacaatgccgagtgaacacgcatacacacgcgaactaaacagacaatctgggacgcgcacatctaaggtaatgcttgcaagaaaactgcaaggagcagcaagaccatgtgtgttctgatgccatgccgtgattttcctgactgtatattcactattatctgtagggctcatctttcatcctacagatttaaactgctttgggaatgttttctattcaatatgtgttcagggtataattattttttcacttatgtctttgggcccgttgaacaggtgatgaaagacacagagattttgaacacgtgtggctgttgcatggctccacctgctcagtgaatgactttttgcagttgactttagtgtgaacttaaatgttctcctgagtgttccagagtatgcttgtgacacagtggtgtccagaagtcagacaaggcttggggcaagagagctactgcagaaagaagggtccacagctgacaacccgagcctgcttgatgagaggcttttcgtgtgcaatgtcagaagcaagctaagaggggcagtgatacaaactgagtttcccggttgctctgttttgctgtgggcacctcttgtcctttgcataaatgtctctttactttaaagaaaaaaatatttcagatgctaagacaattgtcataaccaaagcagacattccatttgattcaaatatggtttgtactgtatttggtgcagagagagacagcaaagacttctcctgtgacttcctttccccacctacttagctggaatctaagactcagtggaacttaggtcaggtgagatgctgctagtcactcatcaggaggactctggactaaacccttacctttctgctaacatgaggctgggcagccaacagtctgttctcagagctagatggctggattagtaggattcaaaagaatcctgtagggtttgcaaatgataacaattcaactttatctatgtgtactttttcaagaagttctcagaatggaagttggctttgctgatccgtggcaaggacagacaccacttgactctcctcagccatgtggacgctgctgaatgctgagggagagaagcccacagtggaagaaacaccgacagtgcatcccttggccacagtgtgttagtttgcacactataggaggtcagctatgtagtaaaaataattactcagaacagtgtcacaaattttaaagaagtggtgttcttacatcgcaccaacccagaacacccaagaacaaaaggtgcaataacccaagcctgacaccccctccaactctctctcagcagttcttctcaccttcctttttctttttgattttctgtcctgtacccttgttttgagacaggatctcatgtagccaaggcttgcctgaaatttgctttgtagctaaggatgaccttgaaatcctagccattctgcctttaccttctaagtgctgaggtgacaggcaggaaccgccatggccagctttcccactctggagatttaagttctggagactaccggaagtcccaggagctcacaaccctgacagcgctgtggcttgccatatgtgacagccttctgtggctacatccccttctcatcctctactgtcatgacagaaataatcataccccataaacatgcttcccctaatttttttcacttgctgtgttacatagccatttccataccagtacataaagaatttttgtattctttctcgtgacttactgttctcatgtatagattccctgactggtttatcagtccccgagagaagtgtctatatttactatagtctttggctattgcaaacactaccttgagtaaccatattttatgtgtcattttcacacatgctagtatgactgctacttaaattctaaagaagtctaatatttggatccaaaagcacattgtgaacttgtaatatagaaacaaagtgctaaattatcttcataaatggtgtaccaacttacattcctaccagcaagatgcgtgagtgtctgttttgcccacagtcttgccaacaataaatacctttgcataattgaacttgggttgaaaaatgaatgccatgatttagtaagatgggccaagaataaacttcttctgtttggatttctcttcctttggtgaggcacatcttttgcaataatgatatccttaaaaatctttaatgaaataaagacatgaaaacaagaccttcagatggccacatgacaaagaaagccaagaaaacacacacacacacacacacacacacacacacacacacacacacacacacacagagagagagagagagagagagagagagagacagagacagagagagacagagagagacagagagagacagagagagacagagagagagagagggagagagagagagatacatgaataaaacatgctcaggttatataatgctattgtgtgtatgttttcggggctgatcaattggcattggtgtgctctttcatggagaagtatttctccagctctcacattccttccttaccactagttctttgtctagccctaaaacctcttgggtttccccgctgtccatgttagcatgtctactggtgttggccttattcagctcatgtttaggctttcatgttgatgagacttcatggatatagcttctgacattactaggagacatgatgtcatagcaaactccctgtttcccctggctcttacaatcttacagctctaggctctgtgtgatccctgagccttgggtgcaagatttgtgttgtctgtgtattaattgggagtgagcctcatgtctctgtactctgattagttgtgggtttctgtaatggtctccttttattgcaaagagaagcttctctgagaagagtggggatacacttttctgtgggtataaagacagatagagagtgttgttagggattatgctgacttaggaaagtggcagttgtaggttcttctccaagacctatgtcctctctagctctgggctggctggtttccagtgccagacatgatgttcctttttttttttttgaaatagttatgattttttttgctgttttttcaagacaaggtttctctgtattattttagagcctatcctgtactcactctttagaccaggctggcctcgaactcacagagatccacctgcctctgcctcctgagtgctggtattaaaggcatgtgccatcaatgccaacgcctgcagaaatagttacatttttttaacaatgtcatttcattgctgtttatttgattgtgggttaagatgaattttgaaagacttccatggattatcagtttatatctattctcccatttctccatggaattaatgttctcttcatccaaaacagctcttgacttgtaaagatactagtcctttgtcagccatattcacttcacataatttttctgtcttaatagcttaactttaaggcaaatatctttgcagctttgtttgttcaaagatatccatactttactccaaaggtttgtccattttgtagatgattaaaaaagaaaaatttcaatccatatcaagggaaataccccactatatgttctagtatgtctttaaagcatgtttgtgttttacattgacctaaatatatttcacttatataatttgccttggtatatggtataagaagttcaggtaatattttcccccaaatagcccactttctggattttcttttatttagatttttgaggatttatttcattgcagacaagtcattacataagagaaaactgacacggtcaagggctcttatgcagacaccatctcacaaaatccacacaacaggccacttctccagagccgggatagtagtcgttattctttacacatgtggcatgaagtgaacaagccagcttgggagaaggaacctggagctctgcaaaactatgcgatcagcacctgggtctctagaaggttctaaggaaccgaaactgaagggcacagcattctctctctctccttccagcttgcacatggtcagcaaccagaatggatgacagcttcaagccacctgctccttcctgccaggctgtgtacactcctcggctctccagctcagtttagaccattgcatccctcccttgtcagcataagctcatggtttctcttgctaccgaccccctaggaaagctcctcagactctttagctgttaaccagaccaacacttcaagctctgtcctctttctgcagctttttagctggacctcacacctgcatccctcagaggtgaggcttggtggtccccaaaatcattcctgaagccactgggttccttccatggcttccccaccagtgtcatcactaaagaagtgtctaagaaacagtgtccagtgagaacatggcaaactgtgagtttgagatgtctagacatcactttcaaaaagtaaagaacaccgaagaaagtaattaaaataccatttctaacacaataggccaattattttagcaggtgacaaacataaaactagccattgtacacacatgattaaaatacgaagtcctcaaactctgcagtttgcttgataattgcagcacagttcagtttgggctactgtcattttaagtgactgtcaagggtagatattggctaccaaatagaacactacagaccgaaggggcttgctaacaaatcccaaattcatcactgtatttgtaacactctatgtttgcttattttgtttttatactttattattttgtgtgcatgtgtgagtgtgtgtgtgtgtgggggggtgtttgtgtgagggtgtacacaggccatgtcacacatctagaggtcagaagacaattagtgcaagttaattctgtccttccaccccagggtccccagaactggatatagggtttcaggcttggtggcaagtgcctttacccactgaaccatattgctggtccctctgtgcatttggaaatgcagttagcctacatttccatgccagaacgaaaactagttctttaatgactgtgtgctacaccacttaaacagcaaatcggagttcatgatcatctctctctacctgttctgtgccatcacactctttaattccacattttccatggagcctatcattcagagtcagggacaggcagccctggatgagaacaatgttggggtgcagagactcatgaagggtacagtctatgaagcctaagttggaaacattaagaagctgttcccttcccagctaacacagtctacctgtcccgctaacagcaagcatccgtttttccccagccatcctttattggatctgattgtagttttaacttatggaaacagaaaaatctgcatttcctgatcactacttaccttaaagttgcaagtattcacgggtagagaatgcatactgttaacactggtgtattattttaaaaaggacaccaagtgtggctttggctgggtcactttacagggaagagacggttctaagtaaactttgccagtgctctgcaacatgttttgttagaaaagcctgtggtagtatctaaaattgtgtaaatcatcagtttttaatctggcaggaagtggatagtagcccattaaactttcgtaattaaattttccctctactcccccatagaaccattatctgagttttctaattaacacaagaggagggagtcagttcagattgatggatctagagccatcccctttcattttaatgacctttaataaacttttattactattgatattgataattataatacaccctttaattctgcaatgtgattctaaggaccttttcaaaaattacaaaattcacctttaaagctacagtgggcagggtgattataccccagatgccaccacacatttgcggctgggactctgagtgagcacaaaggtgagcaggccaggccgtgggcccatggtggtccctcacttggagctctacataagactctgtgctcttcatttcccagcacagcttcccatgcacacccacactagaaatggcagtcacctgaatggaaaggccatacggacagaagatgcacagggaattgtttacaattggaccagcagagagaccgagaggccagggagctatccaagagggtaggccactagcccatggaactggattcccaggtcttgctgggatttaacataatttcacatcctctaggacctgctgcacccaccactggaactgggccttaggggtgggaaggggcatttgccagcaggagctcttggacatggagagggaaccttcattattagctgctgttgttttggggatctgtgttcttacagggtcatcaccagcccatgtggcagtaaccaaagtgagcactgacccgctgccaccactcaagtgtgcatttctggggcagtagcacaccgagtagcttctgctggatgctcactcgggaccttggctaataaatcaaggcttggggtatgatatgctaaactagtcaaagagggggaggaaggaaaacaatgaatcctagagaccttgtgggactcagagctcaaagcatttgctacctgtttgcctacaggaaaagtttactgacccccatccaggattgccaaactaaattaaattgaattttaaaaatcttttgactacctgagtttatctttcgttactttaactccttcaggaacaatgtgcaacatgctttggatactcgtatcacctaatgttgcataacttataatcctcagaaatcgtaaaattattagttatacaaatagttaggaaaatattatttataaagaaatcactcgatagaactgacacacaatcagagctggggtgacagctcagtcagtaaatggaatacctgctagctttctgctgcgatgggtgtaggaaaatgtttgctctgcttatgtgaggacctggatcgagtagggtgcacccacagaaaaggctcagtgtgatggcttacacacacaattcaagttctgaggagacacacgtgagtgaccaagggacttcctggttagtcagtctagcctcatcactgaaccccagggccttgtgagaagaagctctgtctcaaaattcaaggcggacagctcctgaggaacagcagcacaggttgacccctaacaccacacacatgagcactcatatacacaggcaccggcacacacacacacacacacacacacacacacacacacacacacacacacacacacacacgtgctcatgttcctgtacatatgaacatgaaggagggaaggaggaagatgacataaaagtgataaagatgatggagcaagcagggttttaaacagctgtgacaaatgtacaagaatgtcaaggctaacaaaagcggtgacagctacctgaaatcccagcacacagaacactgaggcagagctgagcagtggtggtgcacaccgttaatcccaaactcaggaggcagaggcaggtgattctctctgacttcaaggccagagtgatggccaaggcaacacagagaaaccctgtctcacaaaaccaaaaaaccagaaaaaaagaaaaagaacacagaggcaggaggattgctacacgtttgaggctaacctgctcttcagagccagttccaagttccgggtcaatgaatgaagtcctgtgaacctttgaaactaatttgaaattttaaagtactaccccaatagctcttaaagactaagtaggtacatactgctcataacacataaacgaaattgtgtgtgtgcaccgttggtgtgtatgtgtgttgtgtgtgtgtgtgtgtgcaaaaaagcaacaaactttgaagacacaaagtgagctttccttactctgtcattattataaaatagcacagatggggtcatcttaaaacaatacaaatttattgctcctacttggagaaaatttgaagttaaaaaacatccttactataggggctgaagagataggtggcttagtgattaagagcacttcctgttcttgtaaaggatctgggtttggttcccagcactgacatgggagttcgcaaccaactgtaactctggtgcatccagagggtccagcaccctcctctgcctgagtcagacacatggagcacatgcatgcatgcaagcactcacacacacacacatacacacacacacacacacacacacacacacacacacacacacacacacacacacacacaaatctgttctataatgtcttcgtttttacttctaaagctgctaacataactcaaagggggtgaagctgcaggagatagaagacctcaggcatgtgtgtctggttcacacccctctgctcaggacagtctggttcacacccctctactcaggacagtctggttcacacccctctgctcaggacagtctggttcacacccctcttctcaggagagtctggatcacacccctctactcaggacagtctggatcacacccctctactcaggacagtctggatcacacccctctgctcaggacagtctggttccacacccctctgctcaggagagtctggttcacacccctctgctcaggagagtctggttcacacccctctgctcaggagagtctggttcacacccctctgttcaggagagtctggttcacacccctctgctttggaaagtcgctcacgctttgccagctgtaggtgtggtggttgtgaacagggggccctcctgttgaagcagcagttacttccgatcgtgaaccatcattctgtaggcaagttttatggtccttaaatacatctaggacagtcgtcacaaaacaccctgtagcatccctgacaactgctctctcttctctcctgcttgggatgtagcccacttctgctgttttcatcacctcctgctacaatatccaccaattccagatcatctgtcaccttcagccaccattgtgcccactactgccatagcttcctccactgctatcaccagggcaacccccataagtagtgatgtcacactgacacaggctgtgatgatctcatctcaccacgcttaggctagagtgtgggacatgctgttggcaccatgtgtctgtggctgccggtgacactgtcttagggggtggtagcatatttaggaagtaggtccctcagggacagtcttaggggtcaaaagcccgacatactcacacttccaacatagtctctctctctctctctctctctctctctctctctctctctctgtctctgtctgtctctctatgtctgtctgtctgtctgtctgtctctctctctctctctctctctctctctctctctctctctctgtctctgtctcccccctctttctccttcctcatcttcagagatttgagcattcctcgactcatacgccccttcaccaaatctccacccagcctgccccactatggagagttaccctctccacccacacgatgaaacaagccttccctcacttaggttgcttcttgtcaggcatttggtcaaggtgtcagggaaggtaactaatgtactgctttcggccttttgtgttggggatgtgtttataaatccctactcaccccagagcctacagaggccaccgcgatgtttgcagaatgaaacaagcaaaccagcaaaacacaaagcccaccaaccttccggagtgttcagtgcaggattttctgcaatgtgtccactctagtgagatgaattgcaataggctgaacttacaggttcctgctgtttgtgcttggccatttcaatgcatcatggctgaatggacacatggaaacactcaattagtcttgtttcgccatcatgcatacagctctatccggaaataacaaaaatgccacaaagtccccctggtagtaatagaagaggcagcatgcctgacgcagtagtctcaatatttgtaagattattgccattcaaaggactgtaaacccagctggttacctagcgggaaccctgactatgctgacctctgccttttattctgctggccgttgatccttgctatgctgaccatttgtgagtgtgttccaatacgtagaagttaagaaaggacatccagggcttggagtgatgactccatggatatgatgcttcctgtccaagcatgaggatccacataaatactgggtgagtgtggtgacctctctgtaattccagtgcagggaaggtggggagtagtcgtccccagagagagcaggcaggccagattgtccatgaagcctgagttcacttgagaaagaccttgcctcaaagaataagagagcagatgcctgatatcagcctttgtcttccacatgtgcccacaccacatatgctaacatgcacatatgcaacagacaggcaataaagagatgcatgtaaaacagtttccagagaggtgaaatgtggtacaattgacaaatgtcacacagaaacttgccatatttgatctgctctcctgtgaatttcacagagaatacaatttacacaaggtgggggcagaactggaaggatcctgaaaattacttaagttttgaagacactcatatctgcgacttataacagagaccgaggaaggcattaattccaccctggcactcatgcatggggacagggtggccttaaatgccccttagataggaaaatggaagatatgggcattgatactagaaggctaacctaatgcacatggggaaaaaaaatctactgagtatcagcaatttggctatttacaagttcttggaaataattttatgaattctgtaaaaatgttatgaaggttctctttaaatccacccatgactaacatatttccatattttttaactacaagcctttttggatttgagtctgacattagtgaaatcagtaacaaatgatagagggaaggaatgctctttccatctccttcctttcgagattccaggcgtttttgtcattagagctgatgctaagatttgaaattgttttaccgagttattgatgactgtatctaagcagagcctgagtcaaattatagtatattacagaagcatgggcttccttcaagctccacattaccgtgttgtaagagccacccaggcccattacaaagctgccatgaatatcgtgtccagactataagtcatctcagttttaaccaaattaagtctctattgcttgactcggattgagagcttctcaacacagcagtttgactatggttgtgagatgatcccaagcagaaccaaggcacatgccttgtgcacagtgaacacacaaaaaatatttgttaaactatagatatgcttgggccagctataaacatttcctgccagtgaattaagagctgccaaacctcaacatttttttttagtatgaaatgtcccaaatgtgactgtgggacttaacagtagccagcatattaatgagccactctacaccctctctgagaacgacttcctttataccactgggcaattgccttcctaggagaaatattaacaaaaggtaagtattctaaaatatggttttatatgtcagggttactttaaggactactcacaaattgacaaaggataaagttcttttttaaaaaaagaaataatgttctgtgaatttcattattatacactagaaaattatttcctccccctcttgctatatagctcaggctggcccaaaacttactttgtagtccaagctatcttcaaatagatactcctcctaccttgtcctcttcagttttcagcttacagacatgtatcaacatggccagtaaagtgcacaggcaattctaaaggaatgaatgacatatatttgaactccaaacaatgagttctactttgtatcaacatgtgaattttcagtcatcaagaagagcacgggtatttgtcactcaacaagacaatggtattctttgagtcatggaacattacaggaagtgcttgctgtgtgcccctgaaggaccagaattcctggaagtcctgcacagaggtacatccctgctacactccttctgtactgagatggtaaagaagaaatgggagaggggatttatggaaaaggataaagagggctgaggagatgctcagtgggtaaagtgtttgctgtggaaacccaacgggccgagctctggtccacaccagccgtgtaaagctgggcacagtgtcctgcaaccctagtatcagaggatgcacataaatatttttaaaggaaaaatagatgagtcaatttgagtttctagatttttttctgcttcatgaaatcacatgaagagactttttaggaacccttttcaggagagattttaaaaataagtctgttctctttatctgggacagtcttgaaagggctcctggctaatagctggagtcagaataacaatggagctttgaatattgagaattttcaaagttggtacagaatttgtgttttgtgttgacgatatttctccacaatccatcattctgttcagaaaagtaatcatactcaatgaaagccaagattacttgtacatctagtttataaagacatgtacacacacatttttaattaagtgcacataaacttacaagcattaatgactcaagcataaggagtgaccagatagacaatttaaccctggaacaaggagggagctattcaatagaacaacatttttgttttgttctagacataaatgcttattctattttgaaacacagaaggatgtaaagttcttgaaaccactaagaggggtttggtcagggaaactctatttctctgcagaacttttattgtgaagttgtgtagactggaatcctgctgcaaaccaacagctacagatatccctgaacaagttttactcacgaagctccccttcaattcttcagtcttcatcatgactgacccccagagaccatgtacttcctgttaggcaagcctccaacaccactgagatgcctctgtggagacctatgaaggagttaaatgcaaagcgtgagaaaccaagttgagcagtaaaagcagcaagtgtttaacttctatctcatttgggacctcctaagggaagaaactagtgagctatgcagacttgaggggaaataaaaaaagaaattgtcccaatgctattcagtaatcaattggaaataaaaaaaaccgggcggtatcaggcaataaaatatggaattaggatagagcgcttgcctgggggtatatcctgtagaaaaggttatttttcatgatttatacgggtgttccaagaagcttgggaatgccacgggagaaatgaagacttcagaaagcctcacattgttctgcaaacgcttccataatgcttgtttatgttttagggtgggggttggggagcgattgtacaaccaggtggaacggttattgaccagattgatcacgggaacaaatctgccggtggtaaccttgtttaatgatatgttgccgggctcagccccttgctgtggctgtgatccttcaccggctgggcccgcatgatggatcgcggtgggaaactgatggggccatcactcaccgcctcagcgacacctgcagctccctgacacccgtccctgctgagcagagcagccgagctgcaggggcccaaagggagacactacagctcctcaactggggctctgagcccgcatcttcctttggggggcattgctttggagtgcgagtgcatgaatcccccctcctccagaaataactcgagtccccttcaacagcttcgacttctttacaatctttctcacgcggtgacgccttagctttcatttcactgtgcctaaactggactaatttaaatataaaaacccaaagattcaaaatccatagttgttccctagaagaacattaagtcacatttaatcatattttttttctatttttaataatcaaattagtggtctggtttgctgaaggacatctgttgggttcaccgatgttactaatgatactaagccagaagggagcttgggaagagccagagctgagccttttatctctgtaacaagcaagcacctcatacatcatagcaaagaaaagtgcagagctccaagccgttggcttgagaaagaacaaaaatgtgagggcaggtagtgttactgtgacctctctagtcaggtagccccggataaccaggctccaaatcctgttccattaaatctaaactcgcctgcctatcagatatggccccacataccaaacagttctggaactctctaacgtgggttatttggggaaagatgcttcattgtggtcattagctgtgctaattcttaattttgtgtttgatttgaacatgcaattagcctgtagtagactgttggggtgagggtgtaatctttccctgcagcaaaagccgagctgggacacgcaccaggagcttctgggaaccgaacctgctatgaacccaaaggttccaaatcaagattaagtgcttccggtaaggaagataagtgtggaattgggtatttggtagcttactgagctacacaatgaagtctttttccaattacttgttttgtaagacaaataattttgttgtgtttagccatttcctgccaacctgtaacaaagagctcatctatggtctttgaaatcagagttcatttccggtaaatagatgctgctcatttgagtttcctattttttttttttttaagcagccattccacacttagcaaagttgagagtttcctaaggatgcctttgttccactgagtctccggattttcctcttggccccacccactgtccctgaagcgctctcaaactcagctcttccttagatagtgtttccacagctgtggcttgctggtttcctggcaggattttccctgtcagcaggtgcttcaatataagagctactgtggtccaagccgaatatttataggacacacatacaaaaagaaaactttaaaatttctctacacaggtctttaccaacttctgtccatccatctaatgatcatttattaatacgtctgggatactgtgcctagttaattctatgcttctccagtcttgactgattcactaacatgcttccaaaaagcaaaacaggtcattttgaccaacaaccaccatgagctagacagttttctctggtacttttgttgctcttcttctttggtgatccagggtaggaaaacatatacaaaaggaaggaaggaaggaaggaaggaaggaaagaagggagggaggaaggcagacagacagacaagcttgtggggtgagtagggtggttcatctatccccttcacacacatgtatgtcctaaaagagggaggggaaaagagagagacagatacacagacaagctgagactatgtcctcagcaagtgtttcagtccttagagacacagaaatagttgtgcaagatgttattgaagaccaaccaacacttactgcatgaaaatatagctacttaacacacacctgatgaaatcaaaacaaacataggaaactgggcatcattcgggcttcaaagatctaccaggtaaactgtgtgtctcatgtcttaatcaaaacttcatgctgcttcagatgttgaatcagaaacagctctggtcagagcctccctaaaacagtcattggttgaagaaaatatgtttccaagaaagaatgacactgcttgcgttcgcttttcgtctttgccatgtagatgaaacagctgtgaccttatgaacatacaggttcctgggtgggtccagaaggcagtgtaggctagacccttgttttgagcttttgccaggactgcacacccatagtccactcatgtagcagtacagctctgaatggcactcagtcagatctcctccttaagaggaggacactcatggtattttcgtttgtttcagctttaactccaagccgagcggtgactgagataacaaaactccaactggaaaactgcaaaatcaagtctctgcctaaatccactgcatttgttttcatggtctagaatggcagctccaataatgtttctagatcagtttttagctaaaagtgtaactaacaataaggctacatgtaagttcgtctgttgggttgagtggtcacctaagtgctcattggctatgtgtcacttctttttctcagagaaacacacaagttcttgatgcattcttgatatgactacatatattgctatcattgaagaactacccatacacaggaacacatatgcacatatatgcatgactatcattagtaataagccaggatgcaagtctactttaataagtttcatatacatggcattttgcatggaggaaattctagctggaagatacatgccagggctcggagaatatctcagaagagaaggcagaagggatttgaaggccataggatggggaaagagtgctgtgaaatgttgtcttctggacataacatggacccataaactcatagctgctaaagttgcctgcacgagacacacacaggatcaagccagactttaggggaaaatctcaagaggctccaggtttaactgaggagatattggcagttggttgatactgagggagggagaaccatacttctttgtgggtgtagtcactggcaagttgcctatgggccctcggacgactccacatccatgcacatatgggcagtacctaatggacttagtgggttatttttaaaaggaagaaaaggaaaattaaaagaaagacgagaacatgaagttgggaggtagatggtaggtgcgtggggaaccaggcaaattggaggagggaaatagggagtagatataactttatttcattgtacacatgtgtggaattataaaagaaaaaaataaagctgtaagatactaaataaaaatagtgactctgttcccagttacaaatagaccacctatgcccatgccttccctacaaggctcacagacccacactgaggagggagaagaaagactgagagacctagaggtcatagaggactggagcaaagcaagacaggacactgcacccatgagccctagcacagaacactcacaaggctaaaccagtcaacgttctagcataggcttgtggggggagactcaagagcttctatccctagctgaggatttttgatagttgatagcttctaggggagggagaattttctttaagagtgcggtcgctggcagtctggtaagctcagtgggtggcaccaaacccccaagcacatggatagcaaacactggacctagtgggttacttaaaaaataataaagacatgccaggcagtgatggaacacacctttagtaccagcactcaggaggcagaggtaagcaaatctctgtgagttcaaggccagcttggtctatgaagggagttccagggcaaccaaagcttttaaacagagaaaccatgtctcgaaaaaccagtaataataataataataataataataataataataataataataatgataataataataaacacgaagttggaaggggaaagtgtgggggtgaatgtggggtgcacgagaggaaaatgaagaaaggctaaatatgagcatatgcatgtatgaaattctcaaaaaattaataaaacactatactatttaaagagtaactctgctgaggtctactggaggagaaaggagacaatgtacaggtggggtcgtgtcttccagtagaggactcaggggtagctgtcctctctgttggtccttccttgtcccattgccttgctcacttggagatgaatttgcataggtgctttgttgctttgaacctgagaattccagaagggaagtgatgctcagtgtctgggaccctcccaaagcctaaacaagcaggcagagtgccattactcaaactggtccagatcaccatttaaatttaaactctctgtgttcgttccccaacactgcttctggtttctgccctccagtgcgtcatgacactgccctttgaaaactcccattgtgtgcacacatctatacatgtaagtgcacacttctatctaaaggggtataaatgctttttttttttttttttttttttgactgagcaacattttggcaccagccctgtccttccaaagtgtcctcatggccaaagacagaaacaggaaaatgtttgttctactccagcaactgtgtctttgacaaattcacctagtggccacactttaggtctgctacttagcataatatatttgggaatgtatagagaagcagctgccttgctcctgtgtgatatcttatttgccctctcagttttgaatcatgcatcaatatttatttatttaggtatttatctatttatcatagtgcccagggtctgaatctaggatgttgaacatgctgggcaagcactcttccacagagctacagctacaaactagatcaatatttagataaaattgtaacttcctggcacagaggggacaggcatgtgcttacacccggcacccatcaaattttcttttgatgtctcacaaagtttctgtttcacttaaccagcaatggtcttctgttattttagctctgagtgtggttcagtgtagaccagaaactcattgcaagtcttgtgtgcacataggagatcattcttcaactacaaacaacttaaggcagtgccttcgttctggcgatgattttcatctgatggtaaatcaaatgctggaggaatattctgcatcatgaatacttcatagctactattcttgcttgatagttgatataaaacaaaatggacagagttaaccatgaatccaggacagtcgaacgctaattacaataaagtggtacatgctttaacattgtatctttgttgcaaaacactctcctggaagctaaaataatgaagaaccatctgaatatttaaagccctgcttttaaaaaatactgaaaataaagctgttgtgccaacttaaaaaatgtaatgatggacagtgattgaacttatacacagtatttccacggttgcatagatgcaggcacttgcttggtactagcaattggtgggcagcaatttctaggaacttcctagacattgagggcttactgagaaccacccaaattttcacatcctttctcatttcaattttgatttagaaaggagaaacttgctatataaattaccactagtctgtatttagtgtatctttataaacatttcttatgtaaacctttacccaaatgctggagatttgagtcaccagatttgttgttgttgttgttgtttgtttttgactgttgagtttgccagattgactcaatcacagagaaaacaaaagaaaaaatctcttataaatgtggtccttttcccagtaaaagatgtatgagctatagtgctcagtcctccttttatttgtatataatttatcagcttttaaaaatgcagatttgggatcataatttcattggcagaatttttcagagaaacaatattgtttgctgcagtacaaaatgagaagtatagatataagagaacaccctgctgtcaaaaaatggaacatttaaaaagccatttaattccccagtcctatcattttaaacaattgattaggctgtgtataaaaaaaaacccacaagaacaatattcaagcactgtagtgggggcctgaacatctgtgggcatcgctgaaagccacttaataatcccaatgaaagaagttttacattttaaaatctgagatctccttatgcaaatcattttgcctttagccatttcaaaaagaaatgaaggacctagaggattttacagttttacataacatgggtgtaatggttgtcagccttgatcttacattaattaagatcttggctgatcatagcaaaagcaaacacagaaaaattcttcaccccagctaaaatgaggtattgccacaaagtaagatggtaaagattctgattttatcttgcatttttatgtacaactgaaactggatgttagtcaaggattttgtttattaccgaatggattataataccacaattcaacatctagtaatgaattcacaatgacattaactcctctgtttagccttctgatacagctatcaagttcaatattaggtataaggagatataagacatttgtgtatctttctgtttccacgctaggatttaagaagtaatgactactaacacaattgtaagaagtgtggctgtaggtgtgttctgtaacaagtccaggctacatgtagcaaggtctgttgtgttctgattagcccttttgttttcccccagcatgaagatctctctaacatcaaccttaaagctatgcttcggttttaagaaatatgacctttctatcatatacgaagaagtaaaatttaaaactcactaaacaaccaatccccacaaagaatttgcttttccccacaggtagtacgaaagggagcccaaatgacaggaccccatctgagcctccccggctcccccagtctgcacaaacccactctatcaatcatggcggggtaatgcatagtggctgcacctgtgacaggcgatgattgagtgctgaacacagggcctgcttcgcctgtcgctttgtgcatttgtatttcgctgggccggtttgagaattttcagaacttggacatgggagggggcagagaagggttttaaaggagaaataataatgtattttcattatcaagacataatacaaaaaagaaattaggcaggaagatgccctggccgctcaggtgtacgagagcacccacgcgtcaagactggatatcattacactgtaatttggtttagataagtagaagatgctggcgtggccattctttgggaaatgtctcactcaaccagccgcaatacatttgttcttttatgatcacagggaaaaaaaagaacaaaaggccaagggccatctattgtccaaaatgactaagtttagaaaagcaatatatatatatatatatatatatatatatatatatatatatatatattaattctaccctgatggtgttttagaaacctttgacttactatgacagtctagatataaaaacggtttaacttattgccatgattttcttttgaagaagttgcaattgtaacacgggcagtttaaatcattttcttctaattcaaccgcttactgaaaatatataggggaagatacattgtaaagtgttttttccacagcaatggatatttcctttgattttgtcaattggcatagaactatgtttcctgttgcaaaagaatgaaatatttgattttattgtgtgtatggtttatatacttggaggttagatttctaaaatgactaaatactttttagaaatacaaatgatagctatttgaagatttgagatgaagcctaaataaaacaggaaacattcacaaagcctaatcacccgggatgggggcagtacaataacaaaacaacgtctaaatgtgtaatctcactttcttgggttagaattggcatttttggttgaactgtccgtgatttcatacggaacatctggacatgcttagacttctaggaagaaaaaaatgagtggaatagactgcggctgcccttttatttttcctgtgcagcatcgtttctttccaccacccttcaatgtaaacaaatacaaacacacaaaataagacgagaacggctgcgtgcgcgcggtggcttgttcttgggcaatcctgctcagggcaacttgtatgcaaacaggctcctcggttatttcattgtttgcctgcggaagacccaagcttcccactcttttgttgaccggtctctccagtaaagttgggtggttctgcagagatcatggcagctgatgcgagaggagggggcgctggctctgggagctcacgggtccatcaaggctaagagggtggaggctgcgagaggaagagccagctgctgtggccgcatatgcgtgactctccaccaaaagcagtttggctcagcaaggggtcacctgctgacccacaacgggggtgggggtgagaggttggctgacagaaataggggatccaagcagctggccacccagccagcgggaccgggttgacagtccggagcctggctgcccctgccgcgtcctgggtgcactaggtctctgcctgcccagctctttcccaggccgaccgagagcgcggctcgcaggattgtcacttccacccaaggcgcgaagttcccaactgctcaaatgagggtcacctacagacaaggggcatttgcggcctcgcggcggggcccggaggtgccagaacgcaccccaatgagcgagagctggtgtccccaagacgccgatctgagaggagtcccgcttttcctttagggtgattcttgtgatctgcagcacgagtataacacccacccaggcctggaaggtgccagcgcctgggagcgacagcttgggaaggccagtgcccgggccacccccgcagtaccctgtcccggcgcagcacctcgcctctccgcatcccttctctgcaccccaagtcctgttcaccaaccagacgacccttccttgcagagttaagcacccatcactcgcgcaggaaatctcgacttggcggtgctaatcagctaggaagggaggccggagaaacaaaagacttaacctgaatgaagccacttctcccaggcggtgaacttggccaagggggcgccaggctgcgcctgcagtgggcaagggggagctgggcctgggaaggagaaaggcaacatctggggatcggaccatatgcccaagctttgtctcgtccttccaagttccattgcccttgaagtgattttgtaggcggcccacgggtgacagggagggtgcacagccggggaggggaggtgggggaagagggagccgccgaggaggcccggagcaaagtgaccctgcagccccggaaggtgcgcagccagagatggggaagcgagctgggctttgggggagagcaggggaagcggctgcagcagggaccgcagagagaaaggccttggtgagaaacagatcggagaacggaaggcagcaagcgcacacgcgcggagaaggcatggaggacagtagctgaagtgtaaggagggtgcggctgcctcctcttttaggaaaagaaacgacccccccatcctatttcctttctctttttgcccgccaaccgccgaactgattaggctgtaattaagaccataaagccctcagattatacaccagtttattcactaaagtcggggtctcatcaagcaaattagctgctcccaggcttacacattgggcccgagcttgcctgattaatgaagtttattgggagctgttaaaggcattaactgcagaaaatctcagcaattcgtcatatttaagagttggaaattaaatcttgctatgcaaattagggaaaaaatttaaactgtcttcaggggtgggtggctatccgcatgttgtttttctttaaaattctgttcaagagatgggtgttgaaaagaaggatgttggacttgaaagttaccaaaacattcagttccacttggctagcactgcggaggaagggagaaagaaagaaaacacagccagtcctggagcacacttagagacccagtgcaaagaaaacattttaacaagatgtatttaccagagaccactcagtgtttaaggttacagttaatgtttgtatgtacagaaaaagattttgaagttgtccttcaaagggttcgatctctctctctctctctctctggtgtgtgtgtgtgtgtgtggagagagagagagagagagagagagagagagagagagagagagagagaaaaaaatttggcggttgtcttaaataaggaataaatgtagcagggtcagggtcatacagaatggactgtcataattagcactccaaataaattaatattcttacaattaacaccataaataaattaatattcttgtaaactatccatacaaatatttctgggccaggattggtaacttaccttcattgattctttggtcagttgggtgtgagagggttgatagaagtgtgtcattccagccacagaaggccacagaagggcagatagaagataacccagaattgggaaggttcatatttatcccaagtgctacttggtgagatcactgccccacacatttattcatcactcagatacaggagtaaggggagccaagatctcaagatcttagtaattcttggagagaatcttttatttttttcctacaaggctaacaagcatccatgtgtacatactttctgtatcgagcgaagaataaaaataaacccatgtaatgaaagatgtatttttttcattattcaatgagaagcttatggtcacacaaaactttcaagccatagctacaacttgttctaccatgtctcccaaagataatctatgcaaagatatagtttggaatgcctgtttgcttaaaatattattctgtttgtttcaggacatctgtaagatttataatctctgaaagtgtgtaaaatagtgacgtttatgatgtctaacctctagtgttaaaaggtgcagacagagcagaaatgggatgttctctaagaaaattatcttatcaaaccattgactgttatagatcaggttttaaagtatttgattaattttataataatcctcactaatattgtcactcaaattgatattagagttaatttttttcttttaaaggtgtcaactacagagatttactaatttgtcctaccttaaggaagtcacgtttgactaagacaaagaaagagtaatgatttactttttgttttaaatatttgaaatattcctagtttgtgcatctctcccctttggtagacataatacagctatgtgaaacttaagaaaatataaattctatgtctacataattcagtgtcaccacccataagctggataatcttgacaataaacctccatttttctcagcttatcaggtcttcaaactatttactatatcctaaaaactccaatgcattctaaatttgaactgaaaaacacactttgcttttatgaacacaatattttatattaacccatgaaacaatcctgttgtaagaaatgtctataaacatttataaattgtaaataaaattgtcatttaagaatcttttctcgttaatgaccactgtcctttagactattagtatgttctataaccatattctaaatgttaatgaatccattcagtagagaaacacatgtaaattttattcatttttgttcaagcaaatgaattataaaaaaaagatttatctcatagtttttaagtagcttgagaaaagccatcaaactgggctgaaatttgctcatttcttagaattttggtatacatttagtatttcggctaagcacataagtgagagaagagaaggagtccattttctagtgacgttttaaaatatattctacagtaagcatgtttccaaatattcttttgggtttcatttctaggatcaaaacattgaagtggtgccattgtgatcttaaagtgcttgtcttcatggctttgtgctcctaacagttcatttaaaatatgaatactttttgcccaaagataatttgcctgtacatcatatagtcacatagagcaggcttccaggctactggctgatggctcctagctactgtcatttgtatttctgatctctagactcatatggataaagaaggtcaaaatggtccccaatggaagaaaacttttaaaaccatttggaaaagttaatgaattggatttcccagcacttgcagatattaggatggggagatcaagactcccatcggccagatgaagttgacaggaaatctctaagtttcttttcccctccagagaaacaccctcccggagctgaggcctgggatgagaaaaatgacatattagcttaatgagttatgtttcataagcagagagccttaagtgggtgcacctaaatttcactgtatttatttcacgatgctgtcaaaggcatttgaaaatgccttttgacaaagtattacttttccttcagaaggtgtgattttctgccatggacaaaatgatcatgttcataagcaagaattgctttaaaaatatttgcaacaataatgaaagggacacgggcagaagaggtgaactacccccttttctttttaaacagccagtaagtgagctgtaaacaataaagaaagggacatgggcagaaggggtgaaccatgctttctttttaaacagccgttaagtgagctgtaaagtaaagggtaccatttcacttttgaaaaaaaaaaaggattagaagaaaaatgcttttttttatcttcttaagtgtccaaaataccaggacagaaaacaacaacaacaataacaacaacaacaacaacaataaaaaacccaaaccaaaccaaaccaaacaacaaaaaaaaaacctctctttaggatgcacttaccttgtatctaagcttccaaaaattcagttaccatactgcactgtcatgtggtcagggtatgttttttttcattttagaatggttatggaatcttttttcttttctttttttttatagcataaggtgtttgtgttcctttaaggacaagaatgtcagagaacttatcaagtaggcttgcattatgctgtacctcctccatttgggtgtaacatggacagctttgtggttgaagcttcagatgggagagcttgcagctcaacaagaattttgttattttactcctgtgaactcaccaatggaaagcaggcaaggggatcatagagcagagatgattttattcttaactgtgcaaatattgctcaaaatgggatatgttattatttcacattttcagggcttttcaggtctcttcgggaaggtaacaggattttgatccatgatatgacctagatctttcatgtgtttcagaaattccaaatggggcaggggtgcttcatgcttgcctccctccctccctccctccctttttttcttctttttttggaaagaggggggatctacattttactttctgtaactactatacaattcatgggttgtaagtaggcgatgagtcaattactctaagcagagctcccttgtaaatcataataaaaaccaaaccaccctctggattataaagtgaacctttgacaagtattcaagtttttggatagtccctgtagtgaggatggtgtccctactagcaagggaaggctaagtcttatttcctttctaagacatgcagatcctttaagaggccatattgggaggggggaggcttatttttaaaagaaaaatttttgcagctgaaaaaaaggtcaagcacaaatatgtccagctgaaagagtgcaaatcacactggaggagtggagtgagaagtagctgtgaacgtggatgaaataacgaagtccttatttacatcattatttcaataaaattctaaaaccaacagcagtcaaaaggcttcataaaaggcatggggaccaccaaggctagtcttggcaagtctaggacttgactgttttcagctgggaggaacaatttgggatagagttttagtacggatggcagacagcaaagttaactgtgttcttttcatacacagcccagggacaggcgggtttccacaggcttgggagactgggcctaagtgaaggctcttgtagagcatagccctgttttcctcacgttccttcctacatgttcctcagtgtaactggacagcgcctttacagttttccgtttttaataacactaaaagatgctaaatttatgtggcaaatgcttcgccttcttaaaattaccttctgaatgattgaaacagaaagtaggtgtcgctgagtgtttcttgccccagtaaacttcttcatgacgccatcacgcttccccatcttgtggaatcaaaaaggacataccacagactgtccatagccatttcttaggctgtggttttgtttcatgagctcatttcaggggttgcacatagaagcaaaagtcatgactctttaaaaacatgtaatagagccacactaattcgctacccataacaccttacatttaactaaaagaaaggacaaatttatgttttaataacatgcatcatagcatacacaaaataacagtgatgtgatgtctactgtttttccaaataaaattacgttaaagactaaattaaatgatgcttgttaatcaaatgagaacgttagaaatttttgtgtaattgttatagatgttactgaggaaacaatagcccttccgctggtttttatattaaaaactccatactttccaatctgttttatttttttttttgtaaaaatgaaaaagcattatttgttgttcttaaaataaaaattacccatacttccaatactttgcttaaaatgtagtcatattttggggcacagaggcatgtcaattttatgaagggcaatggttattgatgtatatttcataaatgtaaagaaatcctaaatctaaaactcagtcaagagtgaactgaaatcagagtgctcccaccggaagctgcccgtgcgcgcatacagcggctcaaacgaatggctttattttcatattcaaaatcaagttctcaagtcgtggctgggcctgagacagagaaataatttcagaagagcaagcatttacaaataaaaagaataaaaagaatactgcatctgctgtggcctggaggaattcaaattcacaatgaaagcctgacatctggtggccaagaggaggcgaggtggccggcaagaaggggatttcaaggtgccttagtaaaataaagaccaaattaaggctcggaaggaattcttccttttccacgctgcagaaagtttgctggccacactcatcttctcctagccattttgttttgaggcctctttcctgctcatatttcctaaacattgtttatactgaagatatttttcaagaggttcaaaatgagaagaaacaggttaaaagatcatgaatatacatttacaaacagtttaatgccaacaaaaattagcccgtgggaaatgagctttatattacactattggaatcaaaaccaaccttcctcaagtcttcctcgtaaacgcataaaaaaatcaaaaacccaccaagatattaaaagtggtttttgaaaaagaaaagataaaactactacaagctttaaatcaatgacaatccttgttccttatacatattaaagaaaataattcgtaaaataaaactgttagtaaatagctattcccctcagtctggaataccatttgtattaaaatgatctgaataatctcacattatttactgcaggctgatatctaagactaaaagcatactacaaaggaatctgtccacattcgctgaaattaagcttgcttaagagatgtagtggtaggttctagcaacagttctataaaatcagcaacattgcttcctaagatatgctttcctcagagagttcatcttattttaatatgttcctcaaataattatttaaaacaccactatttaagaataataggatctctttgctgttttttaaacccctaaatttcaaaatataaaactaagaatgtctgcaaaatctcatgtcttcttctgcatattcagtgtccagtgaaacagccagaggggaagctgctgcataatttatgttccttaaaagatttgaccaaacagtgtgaaaattgttgacaatttttgaaatgcagcttggaaattgccttggattcccatcttgttcgttgacacagtcgcaacctggtactgagtttgtttcttttgggggctgtttgacatctttatcccaggggtgccagcgagcagccctaaggagatgctggtggtggaaaaaacggctcctgtctcactcatctcaaaaattcctttgccataccagatgtacagtctatcaacatctgtttgctcattgtttcttacgagctttagactgaaccagtaaatgggatgtgctttaataaagagcttatgcctggcttcctcatttatgccattcatacagtgttggagacaggtccctaatttctgtaaatttgcagcgtatactttcagaaggacattccggatgcccaggactcctgatagagtaaaggctgtcctcacacagtgcgaccaaggacatagaatggcgtctgttaatttgttcgtgacaagttgaaattcccacaaactgaagagaaccgtaagtgttgtgtacttagtcagattatgccaggaatgactgtatataataataacaaataataataaaacatttttccttctttagcaacatttcatttcatttccctaaataaattcttatgtgcttgctctctgtttcaaaactccaattgctttggagagaagtcttttttggcaaagacttacggtcagtaacacaagccagtgtccaagtgtttagagggataacaacgttctgtgtccattaatgaaggtgtccattttcctcagagaaattacctggttttgttctcataacatgagcatgttttacctctggtatatacatttggggactctttaaatgaagctctcatgctttccccttataacaccctgcctcaccctgacggggacattgtgctatttgcaacaaccgtgggaaagggtggcatggttttcacttgcctttgttcactgccggctgtacgacttgacaacaatacctattttctgaagaaataagtagattgtgaatgtaaaaggctttccttttctccccaccccgcccccaatatcagtcacttcttcctaaaagaaggcatttgttaagaatgtagcccagcagtagactgcatccatggtgctgtgggtctgatctccaggatgggggcacgggcagcacacatttgcatggttccaaaaataaaagattgcaatgtgtttgcaaaagcagataatcactgaaacatgcaccctggagtattatgtgtgattgtttgaatgtgtgtgtgtgtgtgtgtgtgtgtgtgtgagagagagagagagagagagagagagagagagagagagagagtcgcataatacaaacctttaccattacgtaaccctagaggcccagctccagaagcaggtccagggaatgggatgtccccatgcctgatatctgcattgatggtgtctgtacagtgagagccatctgccgctgagcctgtgcacatattaatgggccctcatcttgcaatgacacattttacatacagaagcatgtcggagatttgtaacagatcaaatatgggcctgtaacaggcatcccataatgatgttaacaatgatcttcagcatttggttttctgatgatataactgtaaaataacatattttacagctctctcaatccccacctcttccctggtcactcctaaccactgttttgtccccttctgttatgtcctagaatatttacccctagcctctcgttttccatatcactatttgctaattacatagttgtcttccccaaaatggctgtaattcctacaatcagcatgccatcttcctctctggcatctgcacaatgcagagaaccagggtttccagaaacaacattaacttttcaactgctagtactaaatatttcctacatacttatttctgtccaaatgctacaaaagtataaatgtttactcctgtttgcttggtcatctaacctcatttggacccaacgccagccattctctgtgtattaacctatttttcatagtacttattgctacctaaaattgctttatttgttacttccttgagagttatttccttcactagattcttgccactaagaggaaaaggacctttctatgtgtttgtcattgttattcccggtggccaacatcaagagaaactttctacagtttgttttcccttatctaccccatttagaatctgagtctgatggggattggcttgacagtgtagaggggaacaaaaagtccctttaatcttactgtctgctcagaacaggggtcttcataatagcatccttgggagaatttcctagagcctctgcttgtattcttgggacaggagacttatcacaattggaggggtctgagacagggctggtagtatgtgattaaatacgttttgttttttgtaacaataaaacaacttgttgccatacgtcttagatttattctatgaactccaaaacaagacaattcctgcccaattactcctgtagtatactcatacacacaactattttcactctctaaatagagcactgctggcattgcccattcactctgctaagtgctctagacagaaacaacccctgcttccacatagccaaatgggactattatgttcataacacatgttaagcacagtggttgaataggaaatacaagatcaaaaggaatcatagtgaaatctggtccagtgaaaggcaaatccaagcctagctgactataagtggtgtaccatgtgacatccttttgtagtctatttcctcctcctctgctcaaaaataggcattgctctaagatgctgcggagggctcagctggttttagccccagaactatataatctagcatgttggtgtgcgcctgtaaccctagcacttggaagatgaaggcaggatgatgggaagtttaaggtcaccctcacctatgtagtaagaaaagaagagaaaaaaatgtccttgagttgtatttgtggcgctggagagagagctcagtggttatgaagtcacactattcttacagagaatatgagttcagttcccagcacccccttcaggcacctgcaactacaactccaagggatctaacaccctcttctggcctctgaaggcacctgcactcatgtgcacagacctacacacagacacacgattaaaaacaaaaataaaatctttaaaacaaaaaagaaactgaagctgtggttttgtgattctctcctggatatgaaaatgcagtaaatcttgtctcaacagagtcacaaggtaaggtaaaagtctatccaaagcaggactttgcatttggatgttattagcttgttaaaactgcggatgttgacattcagaagtgtgtatcagtgaagttcatttcagcaaaaagtgactgaaactccaaaccagaatggcttaagcaagaaaaccatcccagggagctcagaatacaggggtttgtatgcaaggcttagacttggcacctttgagcctcgtgggtctgctcctttggggactggcttcatacacacactgagagcaaactgtctgtaagagttcctgacatcacttccaaactaaacaacgtccaggaagaaatcttattatatagaattggaaatccactagcatttcatgttctttcatttagcatttattattcaacacctggtaggagccatgaaacattcttgatacttaaaatgcaggtatgagcaaaagcacacacacacttctttagatttcatgggtctcgtgatacactataagccaatcagtattaataatagaagcattatgattgagttccaatccaaagtatcccaaggaaaaaggtcacccaccactaagtgacttagggaactgacaataactgcttttctagaaaattcagaacatatatatatgtgtgtgtgtgtgtgtgtgtgtgtgtgtgtgtgtgtgtgtgtgtgtatcaggttgttgcatggggctggagagatgggtctgtgtagagtacatctgctcttccagaggcctcgagtttggttcccagcacctgtgtcaggtggatcgtagtcacttacaagtccagctccaggagatctgccaccctctctgacctatgctgacacctacatcacaaatgcttatacatacacatagatacacatagataaataaagaaaccttaaaagaatatagattgttgcttgattgatgaaagctatgtgataatttggaagactcatacatagtacagattaaataaacagaattcttttaaacagtataaaaacaatactatgtttgaaaaaaaaaaaaaaacctgaagacctaaaatcatcaaatagcaagagcaaagtacccataatgtattgtctgaaatgtgtatagtatagtttgtgcatttttcgtgtgtgtgtgtgtgtgtgtgtgtgtgtgtgtgtgtgtgtgtgtacgtccatgagtgtggtgcctgtggagaccagaggcattggttctccctggaactggagttacaggtggttgtgagcctgatatagtcctaccagagcaattttaagctccgttcatgttcttctaactcttaaggagctcgctttctttgaatattcctttaaataaaagagccacatgttcttttgtgaaggacagttttgaagctgaaaggcagacggactgtcattttctactgcaatcatggcgacccacgagatccagtgagtgaggggggacaggaccctacagggcatttatactccctcagttgtgcgtcctgttaagtagccagaatctagccccactgtgcccttaagatggcaacccgtatttcattaaatggctaaatttaagtctctggaaaatagttttggaagataaagcattgagagacttgcttgtgaatggtgaccacctagaaagccagagtgcaaaacctccctagggtgacctgaccctcagcccagaacccagagaggaggggagccagagcaggagcagcctgtgttagctgaggaccagcatcctgggagtgccacttcgtcctatcagtttgacacctgaacagctcagaactgataggattcttcatcagtcaccctgttcacaatgctgtgtggacgggggatttaagagcggtgatctgcgctgtcactctgggctacgtgacagacattgttttttgtcttcactccccacttcttccttttcttgaggccatttcatccatcaaccaaactacacaacaattgagacctcaaactcaaaaacacttataatgacacttggttaaatgatcaggcactgccaaacccacaaggaattggctaaccgttccactagatttaaagaactggcccacagctctttggatactcatgaaaacaaacaagaccgtggctccccaaagaaatggcaaaggcacattttaaaaactaaagcctgaagcctgtaagtaagtgccatttggaaccatttaatactacattcttagacaagaattgaagtatagaatgttaacatactggtatgtttcaaaaggccgtccaggtgcatctggccgtcgtttgtagggcttgaacaaaatgtaagccgaggcaagtgacgttttggcaggactctctgaacctgtgccaccttggaggtcacccctccctctgcggtattttgtctcctacacgtgtgaggatgatgaaactcctcctgttatgctgaatttctaagactgtaaaaagaccggggaatttaaaaggtcactgtagtatttcgtttcgtgtgaaggaagtggaaagagactcagaaaaaaagatcctgcactcaaagtctagaaagttgagttagggtcacctaagtgagaaaggggcaccattctccgtgtgtaggtgcataaaactcaggggggaacctgtatcacaggcgcgacgccatgtgagcacaataagagactagacactggttgccgatagggaaaagatgccgtgcacggggtggtcacactgctgtctatgaacatttgaagtgtttatttactctgggtgtatgtttatgtgtgttcttgtgtgttccctcacagggtgcaggcacacgcacatacttccatatgtatggaaggcagagggcatcctcaggccgtctttggcagagcaccacccacgatgttttgtgagatgggggtcactaacgggcccagaacttactaagtaggatagattggctctgaggatcttcctctctagagctgagaatacaagggtgtgcagccatgccagctccactttgaaatcagttccaaggggtaaaatgccagtcaccatgcttgcgtggcaagcaataccaatggagctgtcacctcagctgaaatttgtgagggttttgtttgtttgtttcttcaattgaacttatgcagccaccggctataccactgagctgcattcccagtcctgaagtggtttataagctagcgatggagatcattccagcttataggtgtatgtattattctacactccaaaccctatattttacaacaccccggctaccatggctcacaaagagcacctaagggacttgagggcctttcttctcttgctggggcaatgtagggctgggaccatcatggctagaattctgatctaaggcagaaaaaaggaaaagtaacattcaagatgttttaaagtctatcccagcttcctccgtgaaaactatgactaatctatgcacagaggttgcatttaagtgtgggaacctaatagtgccgtggccttgctgtagtatttaccccttggtggttactcaagtgattcccagttaactagaaccctgactgtcacctccctatgtgcccccagattgccttcctgtgtggctaataaattcaaaatttgtaattacacggaaccaaagcagtgaatgccattctgaagaccttttaaataaatactttatgtattttatggaaaagtagcagcaatccatggaggcacatacattcaggttcactcacttttatcttgtaagagaaacttttttttccccagtgtaagagacacagtagaagaagcaagtagagacatggcagcaactgttacaaatgtttatagacacagccacagccttatctaaagttcatcctgtttgaggacatgttttatgctgtacgatccctctaagaacatcaatctaataagcaccaaatgaggctgaagacaatgctgttgtaaaaaaaaatggagaaaaatgattaaaatatgataattatactgacagcttatatgttcaatctaatcaaccaagcttccaatttgtcataacgcacactcgctcatacattattgcttaattatagcaacacttctatttggaaaagctgtcaatcatgtgaatacccatcatttttcttctttttctccccctacgatggagcatattttaagcaaggatttgatcatctctgctattaatttaacccttagaatgcttcatatgtaaaagccatgattcttcccttctttgttcaaagctttggagaagtttatgccatataacagcctacttttatatgaggattgatgtataatatccccaaatgaaactaaacattggcagaatttggcaatttcaaggttactaagatacttaagcagggactggaaagacggctctgcagttaggagtgcttgccgctcttgcagacagatggagggagtttagttcccagcacccgtgcagacaactcacaaccatctgtaactccaatcccgtggactcaccaggcgcctgcacatgcatgtgcatgaacactcacacaagtcaaaataaagttaatcttaaaaaaaaaaacacttaaaaaaagatacctgtgtacttgtattaaaagacaaaggacacagcaggacaatggtggcgcacacctttagtcctggcactcaggaggcagaggcaggcgggtctgtgaatttgagaccagctctacagaaggagttgcaggatggccagggctacatagtgaaaccctgtctcacaaaaacaaaacaaacaaacaacaaaaataaaacaaaggacaccccttatttttaagaaaggcaaaattggaccacatgtgtctccgtttgtctatgagctgtgctgatcaaggagcataaaagggatggctgtgaagctgaaagttaaatccgtcatctgcagcaaagtgaagcttcctcttccctttgtcttcccctcctctgattccatcattcttccgattggtaaaaacggtccgcatgtaggtgaaacaattgcataagtgtgtgtgtgtgtgtgtgtgtgtgtgtgtgtgtgtgtgtgtgtgtgtgtgtgtgttagtatattctacgagtcactgctctggcttcctgtctgttgctgtgataaaaaacactccgaccaaaagccacttaggcgagggaaggatttatttggtttacaattctaggtcacagtccatcattgagagaagtcagggcaggaactcaatcaggaacctgaaggccaaaatcacagaagaatgccacttgctggctcactcacaggctcagggttatgtagttttctcatacaggccaggaccacctgccagggaactgtgctacacacagatcaatctgataaaacagttcctcaactgagagtgctttttcaggtcatctggggggtgttaagctgacagttaacgctaaccaagtcagcccacctactgagcgtttagtagctttgcccacgtagccaacttcattgcaaagtaataaaatgaaatgcttatccatagtattaaaaggactgaagctgacctcaatatttgaaaaatattattggatttgtaatgtatatgtgaaaatatgtgtgtaagtccaccctgtgatagagataaagaatcccgtctttcatatgatatgcagaatgttgttcagaatcttcagggcgtctccaccctgccccccatggtaccagacatccctggatgctcaagtccctctgttcttcagactccacatctgtgactccatcagtcatggatcaaaggtttccctgttttgtcctggagctgtcagttacagcaagattccaataaaatgctgtcctaatattagtaaaatctgaatatgtaaaatctgtggctatggagaaccacaggtgtaatgcaagctaaatcaaagaacctgaggtcatgtggcacacacttcattaccttcaaggaatttatttagaaatttgttacaagtgttaaatatgaaaacaaataaattagatttttatagtttcatatcaccaggaaccattatattactggcaatctttgattaatttcttaatacctgggtataacttagacttaccccagagggtgggcttcatgtcttaattttaaaaaattgtaataatttttcttcccaaactaaaatttcctgaataataattaattaaattagaaattgaaactactggccctaccaggtagttatgaacattattgttaagcttgaactaagacattgagggatggagcctcaatgtgaattctttccatgctgtcagattctcagtgaattttatactgtgtgccatacccaaacactagaggcacattacctaaatgcaggagacaaccgggaaaacgtaagtctccttttggttccactgtgttctggaatgaatattttcatggtgttctagcacttgggtatatacatttcaaacaagcctagtatgacaacatataggaatgtctgtgactcaaagagcatagcaaaatgttatttgtagaagttatgttggacataccattttttcactctacatgtctttaaacttaactataaatttaaagtttctggaatagtctgtcaaaaattagtaatatatcattttttatctcataaaaaaacaaaaaatacagtattggaaaggaatgaaaaccttggcatccaatttgtgtcaccagcttggatataaaaacttagacatttcactcctatggtgatccataggcagctcatcctcctgagcatgtcgtgggaactagcctcttgatcagatcattatggtattctaatgctatccacagtgtcatggaaacctttctaccatacctggcatcagaagcttttgtggcgatgctctctcctgtagagctatgtatgtttacaagtaaagaaggcgatgggttctttttacacatttagtgattagaaccttaccacagaatcaactgctactgtgtctcccactataaatcaacttggggtggatggcttattgccagctgtttctctacagatgtctatacactgaagacctttcaaattctggaaatttttccacgtttatagagttacttttagattgtggcaagctcatctattgcttttgtatccataggtgggtctaattccctttcctaaaacttagaatttgcaaacaacacatagatgaatggaaactgtaagacttaaagctcaggtcgagaatggtggactagtttctcacgggttttttgagattctggttctggtagaatccagccaacctctctaactactttaagaatgaatatgaggggcttcattaggctgacttgtctgtgtgtgacatcccatcaagtcactgggcacacaagcaaagctattaccagccctcccatccttaggaacctgttcatcagccgatttccactgaagacatttgtctgtgagatgaagaccagaaaaactgacagtgaaaaccctcagtttccccacctgtgggactcaaactggtgtagtgaaataactgctgctcttgagtcatggtatttggaggtagctcatgctccagcaaaaataactgaaaagcttgagaacaggcctaccatcagtgtccccttcatagacgttgtagttcagaaaacaaccaaagaaaagcatcattccacagctagagttttcactgacagaaaaagtcacctcttttcagtcattttttcttcctcatattaatattcaagaaaatcatcatagagaaccagcttagtgtttagaagaactgatggactatttcagtagactattgggtgctgacactgtactgggatgttgtacattgactgatgacttggaagggtccagaatcacccaaactctgaacctctgggtgagtctgtgagggaggtctattgtcccaacccacaggacatcaacctggggcaagagagtcaaggataggcaatggggacaagagacacagaaataatgaccacaagacaggattctgatcaagtggcaaactttatttttctcaggctagcttatatagtcagcagagcaggatatggagaggtgtagaatgggttgtttgtgcaccaggtgttaatgtaggcaggacattaggaagccacaaagaggttgtttggcagggtaaagagttcatgagtaagaggtccaggaagggttgcctaggtgactgagcctgtgggtggaggactgggtcatgttgtttcttttcttgagctgagtttctaatgagctgttatgtaaaggttaatatacaactatgtggccagccaagcatggcctaggatctcatgccaagccatgagatctttggctcctaacagtctacattagcttaactgaggagggaagaactgcaccaatatgggcaacacagtgctccacaggctggaggctctggactgaatacaaagacaaagagagctgagtcacaggactaatgtctctccacttcctgactggatgcagtgatcagctgtgccccttgctgccattgctttcctagtatgatggtctgcatgcctaaactgtgagccaaaataaacccttccttacttttttttttggttggatattttgtcatagtaagagaaaagtgcacactgttgttcaaggataaattcattcaacgtgaaactgctaacttgtggacagttacgtagactatccccaacagtggtacagtatgatgttgctgtactgtgatgtccaacagtttcatttgataaagtaacttctgtcaatggttcactcagttgtttccctgaatgtgtttatcactaatgctatagatggttttaactgtttattcactgggggtaacatatgccaatcctaccttgcagttcagtctttagatacagctgtaactataattcttacaggatatatgtctttgtaatttagtgtctggacccaaactttggaacaaattgcagggatacagagaggtgctttccagtacagagggaaagaagcaagagaggaagaaagacggcatttcatgtgaccatccggcaggatctgggtgcatctgacagggttatatgctgctctaatcttatagaattcatcattgcaaatctttactggagatctgcttagatgaaattatcatgttgcatgttcactcagcctcggaaattcaatacttacactcaagtggggtaaccatcagcatcaaacttgaattgctcatgtaagccttttgtaaaccaccatcatcataattagaaccatcattgattaaatgtatagtgaggccatgtgtgcagatattactcttgggtcttcatattgttgcctcatctgttcttcatgacaactctgacattggtactgttacttttcattatttttacctgcagcagagaagggttaagtagcatgtcagagcatgtattgatactaaataatagagaatattcttgttggtatttaaaactgagttatctatatgactctacctaagtgaaagaaacttgctatgaatgtggagacccatgccctggctttcacagaaatcttcccaactctgttgatctttataacacccagatgtagcctctctgaagtctccctctttctcttaaccctggggagctgggcatagtgtccctgatttctgataacttagtgttggtctttgactgaagcttccagattcaacgcacttgagtctttgaactctacaatgccatcgttagtcaggttgccttctgctgataccatgtgttcatgcaaagccaggacccaaactttctaagaggaatttgcacgtgtttataattacctcaagccagtgttacttctggacatggaggtgggaaagaattcaatcaagggtccatgtgtcctcagaattgacatgctttcattgtttcctgtaagacaactggcaacaatctttgtttgttatgaaggaaggcgagaaggaatcagaacaccacactatgaaacacatggaaggtgatgtaactgggtagatggtgaacattcacgcactacccaactcgagataggtgacccctgttatcagaagcatgtacaacagaccggagcacacaactttttaatagtcaagaaaagcatcacagacacatggaatttatggtgaccccaagagcagccttagctgcattgggagaacttctctcaagaaaaaaaaggctaaagaatttttaaatccatacattagaatttctataattcttctagttagtaattatatataaatatataaatatgaatatttctctgtgtatgtgcttgtagaattcaagaaatgtaggcatattaaattttttattttactattacaattattaaaatactcaacatatatttagtgcaaaactgtataccagatgttgcaagtaaagaattttatatccactaccttatttaaaactcttattattaaatactcattttcattttccttttaaaaatttctagtccagatatagcttgagggaaaacacttaacctttattttttcaaaggtatttaaaattgacttaatagaatttacttcccaagacaccatgcatactagttaactaaggctgataaagattttgacaacaaagtctaatattgtctttttgttctctacaatgtctgctgccttcttcctttttgatcccatgtctttcagcaggggacccttttattgaaaacaatctagtgctggcccattcttatcagctgttagaaagatctcttggcttgtgaagatccaaatgtttatataaacacatcaagttgtgcattggatgtaaaacttttcaatagaaaataccatattgtagacgccttttcatattgtctttcatgagattttttaaaagttgtgaatatatacccatgtggtttttttaagatttatttattttattttatgtatatgaacatttagcccgcatgttatgtatgtgcacccaatgtattcagtacccatggagagcagaagaggatatgaaaccctggactgaagtgattgatggttgtaagcttccatgtggatgccgggaactgaaccccaaccttgtaagagcagcaagtgctcttaatggctgtgccatcactccagccccagtagttcttattattggtgacttgtgatacttgtgacagctccaatgttaagaagcaaacgcaaaagacagctacctgcactttgactttccctagtgagatcactttggtttagggtagtcccgtgccactgactatgtttaaagaatactcaatacaatattcttactgccatggggctatttcatgataacaaagcaacaattttatgtgcacaatattaaaagttctaaaaatacaagatgagttgtgttctttgaaaataatagtagaagctaaagggaaggttcagtggtcaacagactacatactgtttttcctgagggctgaagaccgatttccagcacccatgttaggaaactaacacttcacaaagacttctgttcaatcccacgacacattagtcccaggggaactttacacagccttgtccatggtcctgaaagctacaaggaacagcaatactcaccgagggagcaggggtacctcatacattgtctccagagtgtgctgctagaccagtgactataaggtaagaataacaagatgtgaataaaaaatcatctgtgatgtgtgaagttgtcaacagtccacatgtgaactattagaagaaggcatgtaaacactgaggctctgttctttcgtgttcagtgatgaactttttaaaaagtttatttaacttctgtatatgcctggctccttcattaaaataagatgtgtttgaaagacaaaccataatgtctcaattgaggaagaataattaacaagtcatttatgttgattctgtgttctttttgtttgtttgttttgttttgtttgagacagggattctctctgtagctttgtagaccaggctggccttgaactcacagagatctgcctgcctctgcctcctgagtgctgggattaaaggcgtgcaccaccactacccagcttgttttttgtttctgtttgtttgtttttgagacaaggtctcactatgtaggtctggtcatcctgaaactcattctgtagatcaggctgccctcaaactcactgagatccacctgcctctgtctcccgagtgctggaatgaacgttgcgtgccaccatgcctattcttctttatgacttgtcatctgtaggaattagatcctcaatcaggttttaagcattagtttttgttgtgacaacatttaactgtgatcttgtgagttgttgagttagttacttaacctttccggaaggatgcatgagtagcatccttccaaaattcatttttcctctgaaagggtgtcattttccctgtgcctggggagctgtcctttgcaggtatcctccaggtcagaagatgcctaattgatggatgacaaataacagattgtttggcataggataaattcactttaaaatcctgagctttttagggccagtgagacctgagttcaatccccaggactcacacagtagaagagaagcaattcctgccagttttcctctggcctccacactgatgctgtggcaggccttcttactcacacgtatgtgcaccccacatgcataaatagataaatacaaaaagattacaattatttctttaaaaacagcatcttttataataacacctcagattacctgttacatgagctgggcagtagtggcgcatacctttaatcccagtgcttggaaggtggatctctaagttctaggccaccctggtctacagatcaagttctaggacagccagggctacactgagaagccctgactggaaatatgtatatatgtgtgtattacatagacgtgtgtgtgtgtgtgtgtgtgtgtgtgtgtgtgacattctatatgacacagtctctgtattgtgcaagtaattttctaagttgactttcatgatagttatctcttatacacaatcacaataaaccgatatgcatttgtcaatcatccttctccaccacagaatccaggctccatagaataaactaagctactcaaattttaagaaagagacttttggatactcgattttctttcttcccttaagaagataagcaaggatgtggcttagaggcagagtgtgtgcttagcttgcatgacatcctcaacactgaagggaacaaggacaggaaaactggtttatgattgcttactctgttgcagcgggaggagaaagcaacacacagtatgagatttcccttaacaggttacacagagcaccaaggggaagcagaactcttcttctctatgaggtttgagaattatacattatcttttccggtgttaaatggctattgccaaaaacaaaaacaggataaagaaataataattcagagagaggaaaaattgaagctgaaacatattttatgcatatatattatctcatgggatgaaatatacataaataattggacacatcattttaattagtacctggctagcgcagaagtacttgactcaatactaatgatcttgatactggcgctgaaccataactaatgtcaaaaatttgcaaaaattcaaagaacatcgcccataatatcaatgtgtcctaacaccaaggtcattctctaatgatgaaattttatccacctacataatttatgtgtaaatgaagagtatgggtgctgaaagaaaagggaaaaaacccactagtttcaagtttctgctcctagacggtgctctcctcaatgtaattccaaatcattgcacacctccaaatctctcgcgagagcgacctcagagcagccgctctccttatgacttaccaattactgtcttttatactttctcctgaactggataaaagccatctccaccttgtcagaaaacacggtatgactctggagaaagaggcaaaggagtttcctgccaactccagggtaatggccttgcccgcccccccccccccaaggctaggaaatctacctttgtctttgtttgaagattttgtctgaggaagcagtccacccgctgttctcgtgactctgggcaccagggtcagttttctattttcaatccatgtctttcaaactagtgtcaggacactaagtggggtcgtggggaggtgtcagggaggcattgtctaaaacggtgctgtggaacttgagagatcttctgaggagaggtggctgtgctgctagagatgtctgaagcaagcgaggcagccagtctcgaactcctgctttcatcctggccgcgtttgtaaaaaaaaaaaaaaaaaaaaaaaaaaaaaaaaaaaaaaaaaaaaaaaaaaaagaaagaaagaaaaaaagaaagaaagaaaaaagaaaaagaaagaaagaaaaaatcctctgtaaagctatctgagcgctaatggacattaatagcaagggcaagcaaggtagacagcccatctgctcaattaccaaggacaaaagactcgtggccggtcccatgtgcagagctcccttccatatgatgagtagacacgggttcaccatccccaccccaccctaggaatcaacctcgggcctcaagctttcccccgccgaactgcactcctggacagcgcttgctgatttcccgctacagccctcaggctttcaaaagaaaaatgtatccttttgataagactgagaaaacaagcccagagaggtgaaataactcctccaaggtcacaaagcttctaagcagtagagataaaatgcgaacttttttcctgtgctgctgggatctctgttttttatgccgtccgcctaaggagggggcgatcccagcatgggaagctgtgtgttctcactgggaggtcagagaataaagaaatcattgaacccctggattaaaaggctcaagcagggtcattacagtgaggaactgagggctggaggaagttccaactagaaatgaatagccctgtgaattgtggctccttaatgggaaggaggtacagagacgggccgccgagccgaggtgggattcagggggaggaaacacaggtctgggccccagagaaaccggaacggtgcagccagagcggttgattccagaccccagcaaataaggacagagcagcccaagacggcgctcgcagagcctgtctcagtgccgctggtggctggctgctaaattttcaccttcacgtttatacccagctcttccacgacccgcccgccccgcccccgaacatcattccctgggctgaaagaaatagcagtgaggagttgtgcagtggtgcatgcctgcccagcttattaaaacctggggagaaggcaatatttcaccccccagaaataaaaaaaaaaaaagaaaaggaaagggaagatagacaagtgagagcggctaatccatcggaagaaattagcaggcagagtctgtagctgtttgaaatgatgaacgaagctgaaatggctacacaggctaacatgcacttggataattactccaagctctcgggctaaaatctgtcttggaggagctggaaggctttgatgactcaatttcaatgggcatgcttatgaaatacatagtaaaacctattaaaattgaaattgttcttggtaggtattctgtgactgggctggtgaccctgtcaggcggctttttaataaggtacacactatttttattctcaaagtggcatgtactttagcagctcacatgctcagttttaaccctgtaatgacctgcctgggatttccccgcatgtgtctgctaagcagtctgacattctctttgataaaatgatgggtttccagttgaacacggatatggttggctttcactatacatttccttattactcttagattttttttcctgctctggagacaaggacttgttttgtttacatctatttatacgaggaggagggcatttgtgtgatagggaatatgggggtaacaattcatagaggcaggttctcgccctccaccatgtgagttcctggggttgaactcacatcaccaggcttggtgccaaggacatttacctgctaggccatcctgccagcccaaggatttgttgacaagatttatcatccctatgcttgtgaaaacatctgtaaacaattccatagtacgtatcctcccgtcaaaatcaactttgttattatgtcagtggttattgtgctatgctgtggccataattagaccactcatgtagaatatatccaatcataatccaaaacaaacccaattatttgcaattgagttaaaacaacatagttgttctaaggaaccctccaagaaccatagcagctcaagggtttctcaggcttcagtacccgaagtgtggcatccagaccgcagcttgggaaccccggaagcctgcaggctgcctcgaattccagcatcctcacaggtatcacaagattccaggatcatatgcacacatgggaaagcttgtagtacccattgctcatgctcacatctttctgatccacctgtctgctaaatgcccagaaaagtgtttctcaagaaacatatgtttgggggctggggaggtgattcagagggtaacagcacttgacagacaagcctgatgaaccgtttggtctccagaaccaaatcctacaaattatcccctgacccccacaggcaagctatgccagtagagcacatgcaaacacacacacacacacacacacacacacacacacacacacacacacacacacactttctctctctctcccaataaaagttctaaaacatgcttgaagaagactacatgtatacaaaatctgtccccttgttcaaaaaatataaaaagagaggtccaaaaccactggaaagaaaccaaacagtacatacagatgccacacaaaaatcagagaacacagagaggaaatgaaacctcactttccagttagtcctcatacagacctcagaagcaaaaccacagttcataaaagaacaggcttctctgagaacaaaccagtgacagaaaatgaatgagcactataagtgaaaaagtggaactttccaaatgaaacacatgcttcaggaagactgggaatgaatacatagaccattctggcatggggagcactacaaggaaggatgtaaacgtactccctatccatggagagcactgggggaaggatggaaatgtgctccctatccacccctggagcaagcatcccctggatgattgacaggcaaggacttggaacatgccagcgaatgggaagtggaaactctcctggctgctagcactaaggaggtgaaaacagtataaatggaaatgaagagagaagacaatgagggtggatggagactcattcacaaggaatgtcaaagcagagaacagagaagacagaatacatcagaaaactaaacaacaccctaagcaaacatttgactcttacaagtttccagtttctgatttttgctggctggctgtcatcagctgctaaagcccacaggggtataaattccatcaaccactttactgtccttatagataggaatccaaatccctccaactctgacttccaccaggcatgcatacatatctatattcttcatctttgcttgaccttctccttgaaagcctcatggcctatcatgcccatggccttcaccatgacccaactttggctccagggtcataccatggagtatttgaggattctttccagatggttcatagccttagaattctaaaattctatgtcataactccatagcacttgaaccttctcttccttctgctccaccccatgagtccccggtgctatgttcctggtctctcttccactaaagccctcctggacccatggtggatcataagactccagtactcctgctttctcaccagccccttcatctggtgagatgtgcacctttgttgcccaaccacccaaacccaagcattgggtttttagagaaaaatcaagaaatcatctagcacttgaaagtctgacttccagcaacatgaagaagcaagattcaaagatggaaagcacagaaaccaaaggagcccaaagtcctaagcactattctgggtctaacctcgtgatgtctgtttaaaggacaaacctaggaaaagctggtgttcttcacacctgctgtgtagagactgtatttcaaagaaaactttaaagtttgaaagtctctgacttcactatcactctaaatcaagctttcctttcccccattaccttaaacatatttctgacctttcaccactgtcctccacagtcctttcaactcccacgtccctctatcttaaagtatcatggccttgcccactcttgtcttgggtttcttctcttcaagcttatctgtgtccttaacaagcagccctttcaagccaacaaaatggccttgacttctaagtcatctcctttcttctttttcttacagcttcagcatctttcccttcttctacctcttttctggtttatagatctcaccctataatcatagcctcacttctcccaggcaaaaaggggggaaaaagccaaccttagttcattaccatcccctttggaataaaaattcacccaaagtgtagtttcctgtcatattttcaacattgaattcagccattgcatatttgacttttgtcagaggctgatgtgtctgtcacctcttactgccaagtgtgaattgcatcttatcaaatttccctgcagtatctggtctttacttctttctttgcaaccgaactctattgtgctggctctcctctctctgaccatttccttctcctggtttcaatgttggtattcctacatttactacaaggcttcatacaattttcaatattttttcttcatatttactcacttctcaagggagggtttataacagactaaagattaatgaaggacagatgaagagtccttagccagcaagaatgtactggaagtctgtatgctacattaagactagaagcaacgtatttatacttattctgtttcctccaaccatgtccagactcatactagttcttctatttgtacccatcctgatgcatctaaccatgtccatattcaccctagttcctccagtcatattgcactcatcccgatttctctgatcactaccataccaatccttattcctctaatcacacctatatccagcctgattcttctactcaagttcatactcgacctcatccacacttatcctggttcctgtatttatgtctggattcactctgattcctctgatgatgtctatattcatgctggttcctctaagtaatccatactcatcctgattcttctaaggtgtggctgtacttatcctggttcctctaataaagcaacatattcattgtatacatttttgtgttttaagtgattaaatgtcctcattcacttattaaagggatattaggtacttttcattctccatacttgtgttccaaataaaccggaacatctcaccaccacaagggcatttcagtcctcgtatcttcactgatttaatgactgctgccatttgagcctgtacgcacaacagactcaggaaagtaacgcatgtgtaatagatgctgccagatgcaaatattttattttcattagtgaatatgtgtctttggcaactgcacacttcttctatgtccactgcttctatgtccattcattattaattgagaaataaaaggagcttgggataaagataacctttattagaaaaaaaacagtcaaacccaagccagagcatgccaggggcagcaaggcaggcaggccagagagaagggactcccatgtgccttgcagccccttaaaaacctatcacgcatcatcctgacctcacctacatgccctgacaggtgtggtcaggcacacctgcagccagcttctagcaagcatgacttacactgtcccatacaattccccttttagtctaaaagaggattaaagcttaacagtgtaaagtatccaaaattaacaatcataaaagtgaaatacaagaagatacaataatctgctatgacacatcctaactatgtctattttaactaaaccctaaagccatctgaaagaggtgtccaagcctgaacacctccttccagttctaaccttaaacaatagtgagttatccctaactaggcttacactaccctgatagacaataatgggggaagggggcgtagttactcctccaagttacttcctgctgaaatgggatggcagtagcctcgtggggtcctgtgggaagaaaatgttagtatagtgaaagtctcgaatggattatatccagttcatgttagatgggatttgcttgattgaagatctaggttgaaatcctcaacttgattgaagtcagtattcgaagctctggtcggagtatcagttgaaatggagtaagttgcatccagtgcagtctaggaggtgtggtccaatttccttccggagcgtccagggattgctgtcaggcaggtcttcattggctgtgggggactcaaacataattgttagcagagaaatgtttgcttgtatatgtatgtatgctggaaaaggcaatcgtggaaaaataatgattatgagacggtgtacaccttgaaagaaagaaccaagaaagacaaaggcagtccccaaattcttctttcattctgtattacatcaattggcttcttgatacaatacagaaactctaaagtttagttaaacaacgtgcttggattttagagaaggaaagccaaatccaactctaaattcagcattggtttacttgaatagggattaggaaatgaagagaaacagagttattgagagacagctgtaaagtttaccgtatggcatgttccttttgtttgatggttatagctaccttctcttcttaagcatctacccatgtagtgttcttggacttctggagatgagttttcctgtgaagataaaaacaaaacacttccctttcctttggaaggtttttatttagtttatgagatatacctcagtaaaataactgtcacttgtccttgtcaagaggtttgtctttttcaactcaaattttgatcaactttgagggtatccacagtttttcttctcttgtggaaaccaatgcaaaacccctaccccaatgtaacacatgtccaggcttccataccgaggtcagtacatctttgaagtataccggctgattcagttcagcagttttttctgtagaccagtgtctttctgcagttgtttgtcctttgttattggcattaagaaagtgtcaataaagcattatgcaaactataattaggggttttgtcttcccagcctgtctaaggagcatttccataagtgttctattagctctctcaaccactgcttgtcctgtaggattgtgtggtataccggtgatatgctttatgttataatatttgaaaaactgttccatttttgtgaagacatatggtggagtattgtcagtttttatttgtgcatatatacccataactgccatcacctctagcaggtgtgtaataacagaatcagctttttcagagttgagagcagtggcccattggaaccctgagaatatgtctatagtatgatgcacatatttcaaatttccaaattctgtaaagtgaaagacatccatctgccagacctcattcctccgaatgcctttaggattacagcctgctggcagtggagtttggttataaaaagaacaagtaggacagtttctcactatctccttggtttgttgccaagtgatggagaagccctctttcaaacctttactatttacatgatgtttcctatgaaattctgaggcttctagcaccttccaattaataaacgatcaatctcatcattgccttgtgctagtgggcctggcagacctgtatgggatctgatatgtgtaatatatataggattacttctgtttctgattgtttcctgtaattgtagaaacaatacagcgaagttaattctgtattatcagaaatgaagtctgcagtctcaatatgtaagatgactctctctgcatattgggaatcagtaactatattaataggtctgtaaaatccataagcaccatgagaattgcatataattctgccttctgtacagatgtatacggacattgaactactttacttacctcacctgctttataaccagccttacctgatttgttggcatcagtgtagaaggtaagaactccagaaatgggagtttgtcttacaatacgtagaagaatccagactgtcttttttatgaattatattctgtcagttttgggatagttgttgctaatcgttcccaaaaagccagtaagagctatttgccaatattcattatccttccataaggaggaaatttctttgtcgtgaccctgcttgtcttagctttaacccacgacaaccatgaggttctacctgagtggggatgtgtggacctggacgctcctagcaacccagcaacaataaagaccaaacactgtcatctttagagagctctcagttccatgttgtagaactagagtcatttctttatttgccatcttttctggtgtttcctaaccatcctgccaataccacgagggaaccatctctctttgttctcctctctcctctggtggctggcccctcactcctaaccttccatcctcacaagttacacctattgtccctctacccaggtgagggcctattcagatgcttaggctcacagagatgcaaataggaggcatattaccctgaggccatggtaaacaatagtagtcctactggcattaacaatacaatagctttccagtattccatgtttagtgaaaccaaaggctggatctcaaaatattccatagcggaaatattttggtcccccacatttcttcattagttaaaggtactataatttctgctggatcttttccagacagttgacaaagtcttactttgccctttaaaatcaaatcacaaatcttttctatatatgtctttaactttttattctgtttatctggcagaaatacccactccaatatggtatctttcctctgtatcagaattccagaaggatattctctggatggcaagataaccagaacacagtctaaatcaaggtttatctgatctacatgcgcatccaatattctgttttctacccattgtaattccttttctacatcagcggataatatttgtggactgtttaggtccttatcacctttaagggcaattttaaatgttttaagtcatgcccttctaccacaataatcgtctgtaattgagaaatttctcctagcagcttctgaagactattaagagtttgataacaatccctttgaatttgtaccttctgtggcctgattctatgtaagtctaccttataacctaaatagttaatagactctcctctttgtatcttttccggggcaacctgaaacccccatctaggcagaacttccttcactatgtcaaacacacattccaaaatttccttattggaatctgataaaagaatatcatccatgtaatgataaacgagagattgtgaaaatttcttacaaattatttccaaaggttgttgtacaaagtgttgacataaagtaggactatttagcatcccttgtggcaaaaccttccactgatatcttcgaactggctgtgagttattaagagttggtacagtaaatgcaaatttctctctatcactttcttgtaatggtatagtgaaaaaccagtctttcagatcaattactatgatcggccatccttaagctattaaggaaggcaatagcattctaggctatagagagcctgtaggctgaattacttatttatggctctcaagtctatcagcattctccagttacctgacttctttttgataacaaatacaggagaattccaaaggttggtagattcctctatgtgtccagcctctaaatgttactgtactaatttttctagagcctctagcttctcagagatcaaaggccactgtcctacccagacaggctcatctgtaagcctttggctcctctgaaggtctatcatttgtacctagtttctgtacagcctggatggttggtaactgtaggggaacctgtagccacacctgcttaggggcttactacaggttcacctacagacctgtagccagcccctaagcaggcgtggctacaggttcccctacaggtaaccatttcccatagtgtcttaccagatctttttttactatccagagattgtacataattcgtatctgacactggagggatattaatttgagtgttccattgctgtaagagatcatgcccccagtggtttatagctatatttgccatgtaaggttttagtctccctttctgtccttcccgtccaatgcagaccactaagtgaacaatctgttgaacttagatagagtttcaattcccaaaaattttaaatttgcttccctaagtggtcacttctgtgaccaggatttttgtgtaataatagtgacatcagctcccatgtctaaaatgccgttgataattttattattgatttttacttttaaatgagaccttttatctttgatggaggtctgccaaaatatgtgctttttgtcttgtccagtcttatctgattcttcatcgctagtcaaactaccatctatagcagtgtcacctttcacaatagacaaagaaccatctattcatcctgtgagagattgtcttccactgctactggaaatgaccagaccttttcaatgtgggggccttcttgaggctcccgtctgagattcccagccttaacgggttcccttgaatgtccctggtcgatctacactcattagtccagtgtctgcccttaccacatcttctacacaatccagaaggcagtggcctttcatgtgagggatcattagaatttctttgcctacaatttctctttatatggcccattctccacagctgaaacatctaggttcctgattattcgtggtctcctggagtgggctcttcctacctgaggttctagttcatagtagtgatgaaacctggcctcttggtacctatattgatccctgtaaggtgtttcatcttcccaagcccttctgttatcacctctggaactcttaatctcctgctgccttttgaaaactcttgggatagcttctcctgcccagactccagtatcttgcacactatagtcaatgtgggctgtatgcaaaacccattcttctaacggagctgatctgatctttaaaggcaaaagtattcttttgcatattgggtttgcattatcataagctcttatatatacagtcttactgccagatatgttagttgtaattctactaccctggataacctgtctaagtagtcctggaatagttcttctggtccctgttctattctggtataaacttccagtcattcccctggctcatgaaccttatcccaggcgtttagtgctttagggacagtatatggttgtcatattcagcctgaacccgtgggtcaagcataaataccctcatcaagaatcttatccaggggggtcttcataactgtcccttatggcctggtgttcaagaagcttttctccctccctttccaatgccttccattggatttgacaagaattctcaagtacagctgataccaatcctacctaatctgtgggcatcaccctgttaaaggttgaccatgaatgtaatagctgtgttacgtatgggctatgaagaccatatgagacaactgattctttaatatgtggggaaccaaaataattccgctatggaatattttgagatccagccttgggtttcactaaacatggagctccagaaagctccggcccactattgtattattaatgccagtagggctactattgtttaccatggcctcagggtaatatgcctcctaatttgcatctctatgcgcctaagcatctgaataggcctgcacctgggcagggggatcagaggtgtgtgagtaacctatgaggatggaactttaggaaggttaggggtgatggacaagaggagagaggaaaacaaggagagaaatggttccctcgtggtaaggaaaggatggttagtaaacagcagaaaagatggcaaataaagaaatgactctagttctacaacatggaactgagagctctctaaagatgacaagatgcctgtgtttggtctttatcgccgctgggttgctaggagcttccaggtccacccccccccaccccactcaggcagaacctcatggattaaggctgagacacgctgggtcacaacattaatatgcttaagatccttcagctgtataggttgccatacataagccacctgtcactgggggtgttttttagttggtggcttttctaccattgttgctgggtataccaatggtgtactcgtaatgactttagaatgatcaagatacctgggtggagtaggtgcctcggattggagtgattctgtctccacgtcatcccaacgatccttgagtctagtaatgatatcctcatgaaaagtttcaatctccttaatgataaaagattctaggcatgatagtgaatccgttaattgctgtgactgctcttctatgcagttttctaggtgtttaatacgtttgtctcttgctagcatctgggtggcatggagactgctgtccaggaattgaagtttagactcgaggtcatgatttgcctcagcaattgacctgatggacctctctaatctgttagccctgttctgtaggacatcttccaaacattcgaatctagattcaactctatcatctaccatcttgtatttttcagccattgaattaatggcattatgcaattgtttaagcctatcctggctatcttgcatctttgtatccagattacaggacagagagcctatcaaagtttccaattggctacatatattctttagtttatcacagtcctctgactgcctcacctctaacgcctctgaaatgaagcatctctctgcatttatcttgtcataaatgcgctgcatttctgcttgggtatagactgctctgcccttatcatataagacatagagcaaagcctatcatctagcttctgttctacatgctacataaatgtatcatgggtcagtctggtctccaaaacctcattacgtaaagcttgtatgtcctgtaggcaggtggtaaaattagctttatccctgttcctggggtatctctggctagtgataatgcatgcattagcacgctaacagctagtaaggcatacaggccaattattggcagatcagcaccttccttgaacattgaatttacataagaagcaaaaatgttaccaattgaggcgaatgataaatattcggccatatttaccagtcagcttctactccagatgcgataggaggttttcagctggatgaatcaggctgcgtctactccagatgcaataaccacttttgaccagcaggtggcgcgggtgttcagttgcagttgtttttgagttggacccgaaatttcttgaaaaatccttacagagcgtgttaagaacggattggggctctgtttactaggtgtgggaaaaccttcaaagaacagtactgggtggagaccaagctctgcagatgcagaaggctcatggctgagttggtgcagcgggcagcccagctgtagggcagctttgggacctggagctgggaatcttagcgcaggagggggacatagtatgtgcagtctcagcagaggacgcctggtttttctgccagcggttgcaggccacagaaactgcagcggcagtagcgcttttttggctttggaggcccgcacagaaaggaaaacttgctcggtttggtaaggcaggacaaaatcggcccagccatgcggctctcaactccaggctgcaggcatgcacaggcagctagatctaaatgaatgcgtgcggctgaatgcggctgtggtatttgctgcctaaggcagtaaaaacctcgaagaagcctgtgtgaaatttaaaactctcccaatcgggtggagcgccaggactgagtacaacagatgcaacaggcggcaggccaagaaggtttaactcactgttttccctggaactttggtagcagctggtcaaggcacaagcatgtaggatctctgtgcacaggcgggtcgaactcaattggttgcaacacagggacctggcgtgcagtagtgtcgtagagccctattgggtcacgcggcttctgggctgtgtggcctttccaggcctttcggctccaaaagcagaggccccccagaatggggcttgatctgagcacagatgggtgttgggttcctgttgggtaccagatattaattgagaaataaaaggatcttggggtaaagataacctttattagaaaaacaccagccaaacacaagccagagcgtgccagggacagcaaggcaggcaggccagagggaaggggcttccatgtgccttgcagccccttaaaaacctatcgcgcatcatcctgacctcaccttgaccacgccctgacaggcatgatcaggaacacctgtagccagcttctagcaggcgtgtcccctacaattcatttaagaggattttgtgttagtgatgagaaaaaaacatatggacagcctaatttcttttcctgccacaaggtctcattccctgtggaacgcagggcacatttctttcaatagtgtcttctgcaacatgagggctctctgccgctgcggtatttgtggcttagtcaatgcccataaaatagacagcagctactaacagaaaatagggatttattgctaaagagttaagtctctaagactttatgtgtttatttgtgtggtcatgttatcagatgttaccagaaattacacaaccttttatttctctttcaggaaaaaaagagaatggatttttttttttttttgaagtcacgggggcatggttgtttttctgattctatttgctggtcatttggattttgcttgttttcattttagttcactagcacagcactgttcagattgtgtctgtgatatacaaatatgacaggtgtttagttttgctgagtgtgggagtccacagctgtaatccttgcacttgagaggtaggaagcaggtggatcaggggttaaaggtcatatcaagctgtataggaagtgtaggtctggtctaagccacatgacatccttttcaaataaaaaataatcaatcctctttactaatagatttttctttctcacactgcttctagaacaatttgagtattcacaccgttgagcggttataaaagtttcctaggtcagtgttttttcttcatatgaatcaaccagtgccagtaaaaggatcttagttttgggcatgagagtagtcaaacttgagtttgcagctgcccactcttaggaagcatcaagcacagcggatgctcacacaaactaggtgtgtcaaccttcccagttataacagatgctcacacacacagggtatctcaccttcccatgttacacacacagggtgtgtccaccttcccatgttataacagatgctcacacacagggtatctcaccttcccatgttacacacacaaggtgtgtccaccttcccatgttataacagatgctcacacacacagggtgtgtccaccttcccatgttataacagatgctcacacacataaggtgtgcccaccttcccatgttataacagatgctcacacacagggtatctcaccttcccatgttacacacacaaggtgtgtccaccttcccatgttataacagatgctcgaacacacagggtgtgtccaccttcccatgttataacagatgctcacatacacagagtgtgtccaccttcccgtgttataacagatgctcacacacacagggtatctcaccttcccatgttataacagatgctcacacacacagggtgtgtcccaccttcccatgtcataacagatgctcacacacagggtgtgtccaccttcccgtgttataacagatgctcacacacacagggtatctcaccttcccatgttacacacacaaggtgtgtccaccttcccatgttataacagatgctcacacacacaaggtgtgtcccaccttcccgtgttataatagatgctcacatacacagggtgtgtccaccttcccgtgttataacagatgctcacacacacagggtatctcaccttcccatgttataacagatgctcacacacacagggtgtgtcccaccttcccatgttataacagatgctcacatacacaaggtgtgtacaaccttccaatgttatgaaacaactctcgtcatctacaaagcacacatttaaaaaccgtgtaaatgagtaaacacgtcatcatgccttaagtagcttaagatgctgtgttgagaacatgtgtggataacccataacacatgtatatcatttaataaccttctcggcctcctatttaaggggcaaaacgggatagagagcattcttaaattaaggaaaaatactaggtattccacattgaatctacttgaggattatcagtcatctaatttcaataatttaagtcttcaagttttgtaataaactatcaacttgactttattttaaaacctatatgcatcagaggaatttaactgtgttttaaagcagcaatcctcattcttaagaagttaaaagggcaaaatccccactatgacaatatgaaaaaattcagaaatctagtcactaaataaatattaaaaaatcatcagtagctttataagagagattcatcagaaagatgcaaaaattatcctacttgcatgtacaacaaatgcatacagcaaaattgaaattaaatacaataaaaagacaaataaaactaaataaatatttgaaaaatttgaagacacagatctcaggaaagaaagttacagcccccccttgtggggggagatataaatggcagtgtgaaagcagggggtttagttctgctacataagacctgacagtttgtcttgaatcaatttgtgcattagaacaacttctttcaaagtttcatgaattttgttttgtgcctttgtcctttaactatgttttccgtgaagaataaataagttaaaaatctcaggggttgggggagctcatgtaacaacatatctatctatctatagattgatctgttatttatcttataatctatcattcatctactgatccatcatcaggaatgacctatctacgtgctctctctatatacatattatactataatataggtatctacaaaagtcatcagagaagaagtagaaaatgatggtagaattgaatttttgtacattttaaattatgtctttatgaaactagaataataaaagcatgaatttagcggttagcccagaccaaagaagcaatgactatattagaaagttctcaattctacctgtcttatataggaaactaacatattacagatgttttagttaggtttatgtgcatgcatcttttgactgtttgtatttctatgccgtgcatgcatgcctggttcccacagagactagaagatggtgccgtgtcccctagaactgcagttgattgggcgcgttacatattatttcttctaatctctgtggtgactctttaattcagctagcgacatcctgctttttcaaggtaaagaagcagatgtggggaggtgaagtgggttgtccaggtctcactgctagaaaataacagtttaaaagtagacatagatgtaggggcttgtaatcccagcaccggggaagctgtgacaagcagatctctgggcctcactgaccagtctgctcaggaagctctaggccaaggagagaccctttctgaaaacacatagtggactgactgcccctgagaaacaattcccgaggtggacatccatgggcgcgtggacatacacacactaagaactgcacgggggagggggtatctaaaaagttgcttgcacctcattgtgctttaagaaaacctgaagaaatattaaatatataaatgttcagaggaaacaaaagcataaagactccccagatgacattggccccacaggcattgtgaaataacacaagcaagccccggaagaaaggggtatgcaaaagctggtactgctgagttttgtcttctaatctttgccaacaacacaggaatggtccacccaggtgtctcaagacttctcacacgtgacaggtacaactttaaatccctccatctttttcttctatttcccatttttctctttctctgtgttactactacaaacaggctccaatgccagccctccgtgcagcctgagtcagaaatctggagctttttctgttctttctccatgctacactgaatttctaatgatttgcaggggctggggagacagctctgccagtcaagtgctgcacaagtctgaggatttgggtcgtaaccccaacaccagcacaaaaaaactgggcacagaggcaactgtgacccgggttacggggagggaggaaggagtggactaaccaatcagggagggctaagcttcattgagagaccctgtctcaggaaatggggaggaagacacctggtgccagatcttgacctctgacctccacatacacccccacacacactggtgtgcacctccccaacacacaaatgcatgcataaacatgttacatgctgcgcgcgtgcgcgcacacacacacacacacacacacacacacacacacacacacacacacacacacacacgcacaccactgataataatcagtctaaaggacagtcatcccattttattggtcattcggcatcttcctttcaaaggagcgtattttatagagcacaaaattactttatcctaatcgatcttaatattgaaaaataacacctccaagactgtatgcctgtaccacacaggtaaattttaatcaaacatgacagagtcgggggagaaggcaatgtcagactcataaaagccagctgattggtggaagcgacggtgaaagctgactgagttcagtcactttagctgtttggggtttgccctgacgctaaatggcttcaaggagcacatttatggttttgtcacagattagggaaatcagagtttactggtataatcgctgaccttcccagtacctgagtggaaaaccactctgcacagatcgcgtgaatacaaacgtggatcagacgctcagaccctgatggaggagggctgaaagacaccttcctggaaaacagtctagctgcgcagttgggttgaaatttcacaatgacttgccctgctcctccatggagctgatgtgttgaacatgtaaacttgatcaaaactttatcagtaataaacaccctagtcttaagggggatgcccaggctccaggggcctctggagcccatttgtctatcagtttgtagctaaatacaggaaaactgtattcttcaggctcagcagctcttggcagaagagggtatgcaaaccgtcatggaagccccagagacaaggaagtgccatatggggaagacgtgcctatttagttaggttccctggaaatggaatttctggggtattcagaaaacatgttggaagtgtgtctatttttcttgtggttcccagaaaacccacaaggcagaattcttgtttgtactattgttcctaaatgctaaagatgtgtcaagtcccatattgctttgtatatcaaaaatgggtcagaatttactttatggggatcaaaggtagaaatgttacctgttaaagaaaacaggacatagaaggacacacttttctcctctctttcaatcacatgacagacagttcaggaggggccttcagcagctactgttgactgaattgtgtttatttcctttgattccacacttatagagttgttctaggtaagtatgttttatttcttgacttttaaacagcagatccattgtaaccctgatcttgtagaaattaaatcactaaattagaataaaaatgctggttcaccatatgccttcctgattccttttcttatagcacatggtttttattgacaaggaacagatgactctcacatgggatacatgtcagttcacagaatcttgccatggcttcccttgggcctgttagcatgggttcagggttaacctgagtctctgtctctgtctctctctgtctctctctgtctctctctgtctctctgtctctctgtctctctgtctctctgtctctctctctctctctctctctctctctctcacacacacacacacacacacacacacacacacacacactgctcccatccgctgtcctaaaggactgaagaagccattgaggggtcatagctcggtgtccagccatagcatagtgaccctgggcaagtgtgtagaaatccttgacaatgaataccgtcatgatttcctctacacccctatgtgagaactttccatatgaacctaaggctgaaaactaaggcattttcagctttacaggtcacccctgcttctctttcttagaccgtggacaaatcccttcatggctcccaaacctgttttgagtgtaacattcctacatttaacctattccagtgtgtgattaaaaaacaactcattcaacccaatagagaggttaattctgtaattaatcccagcactttggaggctgaaggaagaggattgtgtgtttcagttactgggctacataggaagaccctgtctcaaacaaacaataagataatcaatctgtggattttttgtaaaaacaacagtattcaattatggcaagaaccagagtgaaactcatttgtacagaaacaaaagacaagatgaagtcatttcattctcagaatccccagcacacttttaatttgaataaaaataaacagccaggtgattgtgttatctataaaaacagatcccgcacataagaattatgacatattacaaaatttgtggaaagctattcatgaccgagggagtgttacaaaggatgtgtctaccaaaagccaagtcacattttttttaaaaaaaagcaaatcatagagtatatttattttgtttttaatgaccagtatgtgtgtgtctgtgtgtgtgtgtgtgtgtgtgtgtgtgtgtgcgcgtgcgcacgcgcgtgtgcacatgagactagtatttgctgccttttctgtctcatctgttccaattgtccaaagatgggttagagaaaacaacacaagaacccttttatttccaatcatcctaatgtccatgatatggaaagatgcaaatagttttctgaattgtcttcttgaggagtttagctgcctgataaacaagacaacatctattaaatgaaatttgaaagataagcaattaaaactaaattctctgcattgaccaataatttcagcattcctatttatagagatacaaataaatcatatcaataaagatggaaaattaatctgatatgcccaaatgtttctatgtatgttcatagagatttttgtgtgtttttatctagctctagcccctcaagttcaatcaataagtaatactcactcagaaaactcataaaagtccttttctgtatggtgattcttactatcagcaaaaataatgaagggaattctcagccatgcctgactgggtctgactccagaactcacttttccttaccatgttttgcttatgtggaatattgatctaaagtagttccttccctctgatatatatatatatatatatatatatatatatatatatatatattcccagccactcaggaggctgaggaaggactttaaattcaagaactgcctgggcctacataacatattcaaagccaacctaggaaacttagtgagaccatgtccccaaaatacaaaaatataatatttttcaaaagtgcctctggctggtgagctggctggacaagccaagacatctgtgtcacaagtttcatgatctgagttaggtcccagaaccatataaagatcgcaggagagaatcaaatccataaggttgtcctctggtttcagcacacattctgtggtggcatgtataccttactcttcatgtgcaaataaatgtagacacacacacacacacacacacacacacacacacacacacacacacacacaataaaaaattaagtctggctataattcagtggcagattgtctgcctagtatatgttagtgctggaaaaaaagacttccctacatacaaataatttttgtaaaatgcttgtaataaatcttaactattaagtacaaaataatgcctctgttgtccatatttctttggagaattatgacaaaacacaattcaaaaaaatcacaaatgagaaggggtagatgtaaaagaccagtaactcataggtgttaaattctacaatctagtcagatgagagaagggttaaaaagaaaacgccctaaagcttagatgactttggaaacacagatcaaaaacaaagagatggaaagtataattaactccattactgctcagtcaaatgaaaacagccatgacatcctgtcttatttatgacacgagcaagtagctcaattccactcctggctattgctgtagaaagcaccgagtcccccagccggtgacacaaaaacaagccctggaaattcatgcccctcgatcatgttataggtgtaagatttatgtacaagtcccgtaaaagataagtagcttttgtgtctttttttatcaattcttgttgcctagcaaaccaaagtgtctgcacagagagccagaacgtcccaaggagctttaaaataataaaatgcaaatttgcttaaatgcatattttgtctcagatattgaatggtatcaataatggtaaaattaccttcatacaataaaccatttatgactataaaatgtatatgtttcggagttgtctcccttagtaattggaaaatgcatccatgtgtatacattcattactgataacaaaaaaggaggtccagggggatcaaaggctcactcagaaccattcttccttctgctattcgatgcctctttcctttccttccaggtcaagtcttgcctcacccagggaaggcagagaatagccttacctttctctgaggactgagagcacttactcacctttgtctgtcacttgacttacgattccttgagcctgagaggatacccagattgtgtaagttagcagtgtaggccatctgcaacaactgtaattgtgcacctgtatccagagatatcagaggcttccttttagctctctctacctgtctccaaagcacagcacaggttctttatttaggcacaagacagcttcctgccttcccgagttcattattttttaaagatgtaaaacctcttgcccactgctgatgggtgtatccacaggagccaacactggaatggcattttgttttgacatgtgtcatcaaaaaagttcataacacaccgttagcaggaatgtaaactggtgtagccactgtagaaataaatgtaaggttccataaaaatcttaaaaactatcacatgatggagaatcaaacacagtagcaggcagaggaggccctgatgaagctgaggtcctaccagatttatgtcggtaagacttagccagttcaacaccaacctagaaaatgtcacatccacaactttgtttcatttttattttctcctctacttgaccttcccttctcttctgttcttttttattcttcctttctcttttcagttttaaggcaaagaactgttcccatcgagtagtgagttttactgtgtgtttacagagcagaaatatttgttcactcacaggatgttgaggtaccttctagtcctcttgtccgtggtaagattgggaggtatcaaggggaagagaccatggaggatatcatagtttgcttttatattgacttgaggagtgtggtagttagaatgagaaagctccccccatcccagggtcaaatgtctgactatttagtcaatagttggtggaattgtttgggaaggattaggaagtgtggtcttgttagatgggatgtgtcaatgagggtaggcttctcctaccattcccagtatctttttctgcctcttgcttgtggctcaagatgtgagctctcagctgttcctgctatcttgccttcacttggccatcatggactctaacccttcagaaccttaaatgcaactaaatgctttcttttataagttgccttggttatggtgttttatcatagcaatagaaaagtaactaatacatggggaggcatcagaaaatggggattataactcttaaagtcctagtcccctcccactcttctcaaaaggaagacactgacctagccaccaccttccactgtctgccaataaatgtttgtcataaaaaatgattaagtcaatctgtgagacagaaactgctcactggtgttgctgggcaccaaaagtcaaaaaagctatatctgaaaaagtgtaaaatttgataaaagagttcagagtataaaaaagtatttacaaattaatttgttttcaatgtaagaccttgtatgtaagtttccagcacagtgaatttttacagcaaagctataaacactaaaatggagattatgaatgtgggcaatataatttatatcactcacatagctttcaattattcaggtgctcaaagcccaacaaattgaataatgagcaggggtaatgaattgaaccctaagaactgcacagaaaacccaggaaagtccccagcaaggaatttgcatacaagagaataggtctgcatgaaagatacatttttctcttttaagccaaaacatatatggaacagccgtgcaattggaatgcctttaaagaaatttccattaaggcataaaactgatgctccgtagtatatctcaaatgaacaaaccaaggatgagaatcataaatggcctgttacatttcctgagagtgtgggttctccagttctttaacaacattgaggggaaattttgagcataaattattaagggccattgatttagatgtagctgagagatccgctggtatttcacagaatctaaatcagagttctcaacagtgtttcatacaaggtgatgggtcagacatttggacaaagaaatgacttctgtttagatcccagccaaaaaatgcccacgaggtgtttttagggatgatgtgcacccagcattacacccgcacctctgcctcagcgatgctgctgactaacaggagccacacctgtcaaaactcctagtgggattccagtcaagttctatgctgattcatgtggtccacttgatggattttacaatcaccgtggaaacaaacccctcagaggttaggttaataaggtgggaagagccaccttaaatgtaggccatgccattccatgggcttaggcactgggttgaataaaaaggagaaagtgggttgggcacagaccttcatcagctctctgcttcctgactgttgatgcaactgactaagtgcctattggccctgtctctatgtcttcccaattcctgccatgtcttctcccaaatcatggaaggatccccttgctcccttgagttgtttttgtcaggtcatttgtgatagcaacaaggaaagtgactattagctaacatcattgaaagtttagtagtcctctcacccccaacttccatccctctcctacgtgactgcccgctcctctcctacttgcattgctgcaagtaattttattcaaagtaacttggaaagaatctgttttctagaaaaaaaaatcaagtggtgaaagtacttctgaggagtaaatgctggtttcagatttcagccttacagtcaaagtgcagagaacaagcaccagtagaatggtcagccagcaatgggtcgtctatgtcatctacatcacacccccactccataaagctcagggactaatgagaatgatgagcaggaaagaatgtaagagtgagatgtcaagaactggaatgaaactgtgtctttggggcatgctgcactaatgacctcacagcagctgcggttgtcggcacaagatctacacaagatcaagacaatagacactatttcaaagcgtgggcaggggttcatgagccctgacccctgactgaagaactattgacagttggtggcttctaggagagagacattgagtttttgttaagggtgtggctccctgtaggtcaatcacactccagtgggtggacctaaagcagtaagtgtatagatattccaaattggatccaatgagttattttcaaacaggagtgtatatagtgtggatgtaggaagatagggtgaatctgagagagttggggaggagttggagattaacatgattaaaatacattgtataaaattctcaaagaattgataaaaatattttagaaaactgaaaaaaatcagcttttcaattttcttggtgaatctcaggcaaaccatgtaatcctttgatagtcacactttctatcttgatattgatgatgacaacagtacttggcttgtaatgttattgagagtgttaacagaagtagtaaacaaaacatttagtgtcatgcctgggccacagggctcacacaaaacattattctgatcagcgctgcattggcaaagattgttaaaccaaaggcagatcagtagctggtgcctgtaaccaaaggtctaccacacccaagagctgcttcagtgattcttgttaagttcagcctagcaatagtggttagtgccactgtacaatcagaaaaacaacaaaaaacaaaaaaaacattgcagtggcagctgagcaaaagttacaagacaatgagtgtatgagtgtttgtttactttcaataggttttttttttggtttcattttgtagattgtcaaaaagacacggaagcttgataagtattgttgaatacagtatgaatatatggctgcgtataatttataatggagcaattgttctgattcaaaaatactgatgtctccagtagaactcaaatgatgacgagctcaaaccagtgctgtagactctaggtgttgcaagattcctccccagaggagacttaaataatatttgccttctagtctctataaagaaaagtaggaggaagtcaaatgaacactaactcatctttctctgcttcctggggacatatgtgatgagatgtgacctcaaacacccgccatcataccttctgtgacatgatggtctgtactctaaaacatgagccaaaacaaactcttccttcattaaacttctgtgtctggtattttatcacagtaatgagaaaagtaacgaacacaaacatcaaaaggtaaaatgcagaggcccagaagatgacttagtgggtagaggcacttgctgtaaaagcctggaaacctgagttcaatccctggaacccaggtaaaggtgggaagagataacttgtcccatgacctatcctctgacctctacacaatgcactatgacatatactcccccccatgaataccatgcacacacaaacaataataataacaacaactaaagtaaaatgctatgtagcttttcagttgaaaatatacattggaagttttcattgacaaagtgacaaaatgggacctcattaattgccttatcattttcataaacatatgaggaattaatattggtcattattgtaggagtcttattttaagtagaccatatgtcaataactaacctgatcagtagaaaagtagaattctgggtcttttcccatgctatctgtgtgtcagtcatagaactatccaagctccggtaaactacaaatgacagcatattccaaaagacttttaagaaatgaaaacaagatgatacacacacacagttgctggaccacagcagaactccagtcaacaacagcaagaactattgttagtctcattctgttcctcctgggcaaacccgagtaccattatctaccatccccttatagaaatagctctattttgatgaagcttttcagcacggggaatgtgctatatttccctcgtaataaattatatagtttatcttgtcagtttcacaactgtaaaatcataaagactgaaattgttgtacttatctaacttatgacctctccactcatgtaaccagccaccaacatagacactaacaactaaattatccgcaatgatcattatcactgccagttgagcccttactcaatataaggcatgggctaaggattctgcatggattcttcatttaatccttatagaagccatatgatgttaatggtttctaccccattttccacatgaacaatggggatgcattaaggatttatccatcttagtcatgtcttcatgcttcttatcagtggaaaaaaagtcacattcctcttctataataattgtctcatctccttaatcatttttattacttttctcctgaaaccctcattagattgtgttatggactaaacatctgggtcttctcaaaatgtgtatgatgaacctctaatctctgatgagttggtattggaagctgcagggtttgggaagcagtcagagtgtgaagatgaagaaagaccttgccagtgagattagaggccttgcatgaagaactagaggaggtccctctctctcccctcccctccccctccttctcctttgtcttcaccccctcctgcctcccctcaccatcttctcctttactccctctcctctctgctaagtaagaacactaagaaaatatagtgatcggcaatccaggaagaaggcttttgctaagaacctgaccatgctggccccttgctctcagatgtttaggttcaagtaccataagagggggaaggagccggaacaagaggaacaattgggaagaggaagggtttagggggacaagacgaggaacaagaggaaagacagctagaactcggggtcatttgaggggagtatggaaacctaatagagaagtttcctaaaatattttcatatatgaaagtggtatgaatgaaattgcctaaataatggaggagacagagctccaagcggccatttcttgtcaccaaatgaagttttcagtactgagattgggtgagttgttggccaaaatgggcccatgggaacccccaaacaacctaggctgttgccaagattataggttgctctccacaaactgacagctccattactaaggacaacacccatacaaccatatggagatgtcaagctggctcctacatagagcctttgcacctatgtgctagtgtcttggtaaagccaggtactctgtatgttaccaaaggagaatgcaaataccaacagagccactaatcctttgctctgcaatggtatcctgcctgaaagatgagctagtgcacagctgtggcacaaagtttatagaaataatcaattgacatttgatttgacttaaggctcattccccaagagagacaccacacctgacaccctttgggtgaccaaaaaactggaattagatagctcaggcacacagggtaaaatactgctaaaataaattttagaatttttattctaaaaaataaaacacaatgaaaaaaagtagcaataagatgaattccaatgacattttgttatactcatgaatcagtgccataaaacgttgctcgaccatcatcggagaagcttctgtggtggtttgaataggtactcaggtgtttgatagggagtggcactattaggagatgtggccttgttggaggaagtgagtctctgagaggataggctttgaggcctcctatgctaagctatggccagcacacagactacctatcctgcctgcagaacaagaggtagaaatctcagttccttctccagcatcatgtctgcctgcatgccgccatgttccaccatgatgatattagacaaaacctctgaaacactaagccaccccaattaaatgtcatggacatggagtctcttcacagcaatcgaggccttaaataagacagcttcttcctggaacagatagaaaaaatgcaccccgataatgtgcagagaatgagagaccttacaacactgggatctaaatgggctgtctccatcaaatccctcccttcaggactcagggaccccaggaagaggagaaggaaagagtgtaagagccagaggagaggaggacaccaagaaaccaagggtctctaaatcaacatgatcaatataggtatgaactcacagagactgaagcagcagcacaggacctgcatgggtctggaccagttgagatcctagagttgaaaatagaacatgttcccctgtcccaaaaccttaagaaatctccaatatataaccagttgtaaatgaaaatttagtttccttcaaggaagttctactggataaacaaacaagcctatcttaaggataggctccatgcccagcagtagatggacaaccaaaaatgaactcaagggcatctttggaaggttcttgtctcataatgtcatgtcagggctctgatttttaaattatcttatttttattttattaatatatagttttcttctctctttttaccctacagatccttagtagtttagtgtttttttttttttttatgggatttgtgagtgtaccaatcagtgggtctctgtttcttgtgccttctcctgggctctttttcttctgtttttttttttttttttttttttttggtctaattctgatgtgttagtttttgttttatctttttatattatattaatattccatggatgcctgtttgttttcaaatgagagacagaaggagagtggatccaggtgggagctaaggtagggaggagctggggagaggagagggaagggaaactgagaaatgtgagaaaaaatctattttcaataaaaggggtaaaaagaaaaagacactaaagaggataataccgaatggaaggaaggaaggaaggaaggggagaaaggaagggaggacagaaggaaggaaggaaacaagctaccccacctatggtatttttactgcagcagcccaaactgacagatttctcatacattaatggtccctgaacaaccacgtgacccattgctcccacaccacattgttactctcccatgttgactctatacttgaccacgtcttttccaacacaataccaaacgtgaaaacagtgtaataggagtgtaataggaaaagcttgggctttggagtgagaaaacccagcctaacacccaatcccacaccagagatctttactctgtcagctcaggctgtagaaaatgcatcagatttctatggttctggccttgcaaaggcagtttgtaactgcacaacgagactcatgcttgaagcctggctctgctatttaccagctctgtggagttccggtcagtcatttgaaatctctgaattcagatccctcatcaatgaaatgggtagagcaatactaattatgaaaaactcgttagtcaaagagcacatcagaagttgtagacaaaagttgcaattactattgaaagggtctgtaatttttgtagcaatgattgtacttgtgtactgcaatcttgttcaacatatttccatagattatacattttaatttcataaactagaaaaacataagcaaatacacaagaaaatttcttaccaccttaaattaataatcatcaatattcgggtgcctgggcattcagatatttttgcaaagactgggacatattattaatgctgtcttgtaaactgtctgatttatttgttcgtttatttatttatttaaaagcacattaagaacatctttgtatgtctataaacaaattaccaagactgcattattcatggggatagcatgttccattacctggatataattacaatatacctaagaaattccaatgttcacatttaatagttgctctaattttgtttatttaaaattctaagccatatgcaaatcaaatcaaccaccagactttaacagaaaaaatatttcatgttaaatgtaataggcaaccaggatctatgcctagtgcatgagctggtgtttcgaaacctattccatatggagagattattagtgttcaggcatctgcactggcctgtccttggggttctgacaggatacaccctcagctgcagccactaagagcaccacctgtgcacattcactacgttcccttttcaaagggccctgtccacctcccatcctcctctctgcctctccctcagtctgtctcccccgaccctgctgctcctgtcccaggaggaggctggtctcccctcctcccctttccactttttatgatccctttccctaataagaaacccctccacctgagctctgtctcatggcatctttctctccagccacttttgttaaattgatgtgtggtggtggggtggtgttgttcctgcctcaactagatgtgccaggctttgttgactccccatgggagtcctcaccctttctgaggagtagatggggcagggagggagaactgtgattggtgtgtaaaatgaatttaaaaagtaaaaataaaaacataaaaatgtagtaggcatatccaatttatcgatgccacattgggatttaaaaatatagacccagtcatgaaatgcacatgtgactcacaccttcccagagcccacatccctgcctgtgaatggctgaggctgactggaggaggactttagcatcactgcaggaatggtcctcacatctccctggcagggatgctgcaaaaatgcgaggaaaagtcttttctgttttccatcctaaggatctacaggaaaacagtctctcagtatgatttacacctgggagggaagtagagctgggcagggagaatgctggttcactgaaacaacttgatcccagccaagaaaatgacggcttggtctgttgaagagcctgcacagtgagtgtcagggtcactcccagtagacaggagagttttctctgtctccagcatctctactctttgccttgctgcactgaccttttttaacggaagaaatcacccaaatctcagatgattgtctacgcatatatgctgccagcagaacaaggtttacaaacgacatcgcagttcaaaaaccagctgtcatatttatgagaatttcttaggaaagaaataatcgtgggccagtgagatggcttagggagtaaaggcatttgccatcgagtctggagacctgagttcagtccccggagcccacatggaagaagaaaatggacgtctgcaaaactccccctgacctccatgcagccatcattacaaacagcatgtgtgtactcacacaaaaataattgttttaataaataaaagtaaatcatacttcttggaacctcaacaggggtcagaagtttcccatcacagacagctacacagtgcagaacaactgttcaaacacatcagctagcttggtttacattaaccaaatggcttgttcattagtattttccgatagcattgagttgcatggtgttatgaaacacacagcatgctttgaatgtgaaagtctatataatttttttctgaatatccttgatctgtgtttggttgagtccacagatgcagaatacaagcatggggaccactaactgtaaaccctccatagactcagttttacaacttaccagtgaggttcaggtgcccagtactcttcatggaaatctttctggaagtcagagaatcagctctgcttttcccagcaagaatgcccattttttaattttatttaatgtggtgagtctctgataggatcgctatacccaacacagatgtctctggttcaccacttaatttgaattgctcagtggtttaactagaaagcctttgctgtttattcgtttgagggaagatacgttccatgtggacaaacatcctgaggcctgggtggcctcagactgggtgaaactttctccgacttcaaccttgtcttctcactggcatttgcatgagtacaaatgtcaaggactaatcaggatgagaaacaagaggatctgttctggaaggacccgagggtccgtcactgcatttattctcaagccttcttgattgtgccttcccaaactctagaacattagcagggacagagctccaatactctcagcagagtttgctatgtacagtcagtacagctcagctcaaaatgtcttctctggtcgttctgtcattcctcaaaagtctgttgtgggttgcttgttcctaactgtgaaaacaatggaacgtattgattattgcttaacattttgtacaggaggaaaacatacatcagggtggcagacagaaataaaatgggatgtacatatgttgttttcttttctaagagctgtgtgtgtgtgtgtgtgtgtgtgtgtgtgtgtgtgtgtaagacataagcagcaagatggcttggtggctaatgtgcttgtcaccaagtccagaaacccaagttcaatccccaggatgcacatggtaaaagcagagaacgtccgttgtccttggacctccacacccctgctatagcaatgcgctgtccccttttgaaatgaataaataaatataatagtttgtttttgcaactaaaaacagatgaagatttactttaccatattttaacacacacactgaaaatagcatcatcctatgaacaatccacatgaaactaactaatgagatagtttgcgctttttttgtatgaagccttaattctgagtattcgtatttcagttgctagattgcaccagtgaccgggtaccatcatcgtgcagactaatgtcccctttgctcactgagaaggaaatgcaagccgtaaagaagctacctcaaaccagatgggagccggaggctaaaacaggatctggtgacctagaatgaagggggaccctcttcctgaaacctagaatgagaaaacaacgctatggacgaaggtgaaagaaagtaaccattaaagttctaaacatttttgcacccctgactgcaaatcgggcagtttcttttgcttctgcaagctaagaggggtagagacagacttcttgacagttacatcaaagcagaacacacccaccatttctccagaatttaagcctctatgtcttataatggcccaataatcccactcctatgccctcaacagtaaagaaaatgtatgttcaaaataagaactatcagagactagccacagcattttcagtaacaaaaaaccagtggggcagcctggatatccatcaagagtaggttaagcaactgtgatatgctcacacaatggaattgtgcacatcagtaactaggaacaaaggatgctctaaattttttcttaaataaaaaaaaaatgtgatagtcaaaggtagcatgccagtcgggctgtggtggcacgcctttaatcccagcactcaggaggcaggcagatctctgtgagttctagaccagcctggtctacaagagctagttccaggacagcctccaaagccacagagaaaccctgtcttgaaaaacaaaagaaaagaaaacaaaacaaacaaaaaaatccccaaaacaaacgaaacaaaaatagtagcatgcccactgacagtctacatagggtctaaaaacaagcaaggctatgagggtgagagaaaccagagcaactgggcagcagtaatagcaagtcaataagaaggctacagcagtctcaggcccactgaagttctgcggcttggataggtggtggttgtgtcgtgtgcatttttgttcagtctccgtgaactgagcattttgtgttaactcacttcccatgactagaacaagcacaggagataactcactaagagaccaggctgtcctgaagttttagaagtttgagtccatcatcggacactgtggcaaggcatggcaggacggctgaagagcttgaagaccgttcagctcagaccaaggtagtgaagaggacaggctcccgttgtccccttcaagtgtgggttcagtgacctagggtccagtcctaggtccactcctctcacgctgagggccaggcctcacgcaggggcctctggagtcctttaacaagcaaactataaaatctgtacatatctaatcggtaagttcaaaatcgaatgaaaactaagttgtttaaatgtaaaagtaaaatgacgctttgcagacactcaggcagtatctactccttgtccttaaggagagacttctgtctctttaatcctactctacagcattttactgaccctctctccttcccaaatcaaatcctactaaggctgagcgaccatcagtctcttggtgatcattttcaccaaagagttaatgagagctgaggctgcgggtgaggctttgcggatcactcccacctcttcatcagtcagtcctctagaacggttttaggatttttctctttaatgcgagaaacaatttttcaaagagtaaacaattaacatatgtgattcagtacattaaacaacttcatcacctctttattagtcctgaatgtggccatatctgggaaatttgaatcaatgtgtttccagctattttccgatgacatttaacagtcagacttaaaaacacagaagaaagcattatcagttttatccaaaatgattatggccaccgtttgaatgaaatacacattttgcaagctataaaccatatcattaccacacactggcttgagtgaggtttggttcacaaactacggtgatctaacaaagccattaaatctgtctaaaggggactcatttgggaagcaataaaaattttaatcattttattattaaaagagtgtttaatatgtagctaattaaatgccaaaggcaggttatctgagtttaaccttcaaaaagaaaatgatgtatcaaagtctgcctctggcatcatgggatagaaatgtcatcctcctaatcattgtgtgacgactagctggtggccttttctagagctatagttaaattacctgattaaattaatagccatttagatgttttaggaactgcacagacctatactaaatgaaaattaggtccattacattctccgagtgggctagataggtcctaaaataaaacatgtatgccattgcccacattacttagattaagcaattaaaagctccttctgaaaagtgactaattccctataatgtgaggacaactggatctcccactaatgaccacaggtagggctgcttgcctttactgcttgttttttttttctttatttctctcactctccttaagtcctgtttgttgtaaaacagaatattaaaatttgaatgcaccacataaataagtagctacacgaaactatttgttatttacaagacaaccaaaagtgacatcgtgtaagcaaagaggctagagagtggactggaaaaccatctcaactggaaccgcctgtcactagggctttgcggtctgcaggcttcacatttgttcttcccagaaagtaataaaaagaatacatgtatctttcactttccaagttaattctttagcatgaatcatattatgaattgtatcagaaaatactatatatttatcaatgtataaaggaagcaaactgccattcctcccaaattattcctgttgaaaactgtgaacttatttaagttttaaggacagagtcttgggcacagttatgtcaccagtacccagaagagtgtccaacacatcataggtagtcaacaaatacttgctggcttgaaggctagtctggtcttccatctcagatgtaatttctagcacccatttaaaagttatctcgcatactcacattttgagagcatgctataaaattcaatatttgccaaggaatttttaggccagtctgtatggtatgaatctgtgtgatgattgagccaccaaaataatttcctttatttataattaaggttttgcttgaattcatttcatatctaccagaggtgtaatgctatagagtattcatggactataagggtctcaagacaaaaacctttaataatagttatcccaagatcctcccaatggctaaggaacttagatctactctaagatatagtgttaattatagataaattccaactgcaatgtgttcctaatcaggcttaatgctctcagctgaggacatagtcataagaatgtgtgagcgagccagagtctgtgtagacaacatgggagtgtttgtatctctcatagaaaataaatgctgtgtggctgagaaatgacggctcagtggataaaagtagtcactgttcctccagaggacctgagctctggtcccagaacccatattgagcaacttagaacttagccccagctccaggggatctgatgacaccccttctgtcttctgtgggccctgcactcaagtggtgcacatacacagatacataaaaagcaaataattctgtaaataaaaagatgtcacaaaaagagttctacatgcagagcaacctgggagctgcttgttgggtttctgtagtggcatctagtattgcgggtagacagggagtgtggccacaccttagggtgtggcttagtaaatgtgggtttaaaggagtccacaaatacccagataaagaattaacaggtatttatttggggagcactcacacaatgatggtaaataaccgtctcagtcttcctgctcctggtgatgcagcctctgcccttcaggatgctctgaccacaacccaagagacagcgagccagcccctcctcttccttataaggacacatctgaagccacgccctaagacgtggccaccactccaagtccactacaggcttcatggcattggaggacacaaagaacatcgcatatgcttctgattgtgtttccttttttttttctacaggaataatgaacaatacaaacaggtgtgctttccaagtttttgcacccaggttgattcgttttcatttctcgggtcagcccggctgccatctgacatctgaatgggaccatgaagctccattgcccatttttatcctcctattatgcagagccagtttaaaatttagtgtatctttagtggagcctgacaggtgcactgagggtgagtggagggaagtaagagagctaagagagagcagccgagtaatttacagtccttgtgttcataaaagctcagcaggcagtaaggtcagatacgcatgcacgccgtcacagggacatcagccaggcctccagatgctatagggccctatccattatcactcgacctgcgtgcgccacaagatactaacatgcctatccagcaccagttaatctgccgtgacagtggaggagaacatgacagcagcaatactggtggctggcactcatttcaaacccagccatgacctggacctgtttctgaccctgtgacttcatagcctggagtgagatatccaccctgcctgcacttgtagtgatgggtgcggtgcgggccaggtggatatctcactaccatatctgttaccagagtggccggccaggagggctatgtgggttagagtactgctcttaccttttgtcagctggatcatcttgaatgaagtttcagctttttcatccacaaaaatgttgatcaagatacagccaagtcttagatttcttgatagacatgaaaaaagaaaatttactattgtaaaatatgccacacacatatatattgacatattatatatgtcaatatataataatgacatatatattaggcacacgtgaaatattggctcttgtgattatggctgatcaccagaaactcgtctatcatgtcagaataattcatttactgtattttcatttttagatgtatttgtttttatttcataagtattaatgttctgtctgcatgtgtgtacaaagtgtatgcagtgcatacagagaacacaagaggccaccagatacctgagttgtagcctcttgtgaactaccatgtgggtgctgggaactgaactcaggtcctctctgcaagagcagcaagtgcttttaaccactgaaacatctctccagctcctgagaataagttttctaaaacttattttctttttaattctgtgtatgtacatgggggtatttatacattgaagcctgggggggggtggtgctgaagagataactcaatggttaagagtactgactactcttccagagaacccaggttcaattcctaacacccacatggcagctcacaactttctgtaactcatgtctgagatgcagatatatgcaggcagaacacaaatacttataaaataaagtttctaaaaaaggaagccagaagagagttggagttagaggcagttgtgagccacctgacccaggtgttgggaaaagaaccccggtcctcttttatagcaccaagtgctcttaaccactgaactaataattaattttgttttaagacttagatatatcctttttggctgatttgataatataaaaatcactccattttcttattgagctgacattaacatgtcaaaactcacactttgacaatatcatcataattatctgcttgaatagggagacagttacaatatgccctaggaattagaggcatgaagcagaaatgtctctactcaacagtctgccgaagttcctctccttcccagacacggctcacctccaaatactgtggaagtcactgcaaggccacagctatcaggaaataatctcacgtgcaagttttgccatttacaaagcacagctctacataacgcagttcacaaataccctacaacaaagagttccatcaacgtttgagaaactgaacttcttgttcaaattggctttgtaccaaagaggtgtttctttccttttcttttctttttttcttgtaaatggaggaaagagaagatggagcagcaagtacccccccacacacactttcacatcttagatctgggaagaaaatgatcggcagggttgtgtttgatctgtggtgaaatgtaatattctgttcaggagttgccataagtgctctgattgaggggcacagctggggacgcacaggccctgcatattttttgcttctttcctttctcatcagctggagatgtgacagagttggtagcaaaccctctatccggtatataaaaaccaggcacttaggcatttttgagtgataattcaataggattaaattacactcctatgacagctgaacctcactaatgaggtacatttcagtaaactgttgactgaactgtctagaaggttcctttaatttaccaacatgtaacgacatgggaaaagcgttagttggctcgatgaagatgataagccatgaggtctgtgggtattttacatcaatacctgacaacctgaaggggtttctgtcacctgctctatttagcccaaggcagacacagaataactggtacctgttatcgtgattgacttaccaaagcaatgaaaagaatccccgtgaagagggctgggtggaaaacatgtcagagaaatctctgctcctttcagttatcaggaagggtgttccttgcaaagtggacaagggttgacaacaaacttcaaagaatgcttcattttttcaaattccttgagtctttccctgttagataaaacatgaaaagtgtctgtatatattttcagccaagtgttgattaggaccctaggaaggctcacccttgcccactgaagcagtgtgttccaatcaaagggaagaaagagcacataaggaaaaagatgccacaaactaaagacaagaaagctgaatggcatgcctgttggaaaacatctctagctatgattatactgggcaagaagaaggcttcaagagcatttgcaatccattcgaaaaatgttttaaaagctgcgctcctatattgtctaggaagcaatggtttcttgggaaaataacactaactccaagctaatgaattagggagtagtgtgggtatagatgggtcctgggtactcaggtatgttttagtagttattctttataaaccaatcaatcacaaaatgttagcttagagatgtgttctggcctataccttagccaggtgtggtggcacatgcctgtaatcccagcactcagaagcagagccaggagggtcaagagtttgaagccagcttagactcggtctaataaataaataaataaataaataaataaataacaaataaacaaaaattaaggactaggcatgtaactcagagattcggtgcttgcttagcctgtgcaagaccctgtgcatatcaccagtgccaccaaaataagaaaaatgtgtgccacgcaggaaaggtgaaaattgcatcttgtggcctttgcatactcaggtgcattgcagcactactacaatgaccaagttcagacgactggataaaggaaacaggagtatatacacagtgagatttaatgtagccataaaggatggcattatttcatgtgaatggaaactgagaccacagtcttaagtgaaatatgacagactccgaaagactaacgcacgcctttcctcttatgtgaaatgcagttttaagagtgaaggtgggtgggtagagagatggctcagtggttaataacacttgttgctcttacagaagatctgggttcagttctgggcaaccacaagagagctcacaaccatctgtctctcagttccaggggaccccacacccgactctgacctccagggcactgcatgcgtgttgtcaacacgcatatatgaaggcaaagcactgtacacatgcactgagaataaatttaaaatttaatctaatttttaaaatagttggggagatgaaagaaaaatgggactatgagaaaaggaaagggagccgccggacagggcgggaggacacatgaaggtgacgatggatgaatatgagtgcatgagaaggctagaaggaagcctagtattttgtacaattaatggatggtaacaaaaaaaatgggagggaagtagaaaaaaatactaccttactctaaattgccaggcattttttacaagaattcaactttttttttttttcttgaggcaggatcttacactatagcctgggatggtcttggactcatgattctcctgcatcagcttcccaagggctgggctgatgggtgtgcacctccatactcagctaagaattagctctggagtgtcaaacacaccagagagaaatgcaggtttggccaatccaaagcaccagctaatccataagccacatctattaggcttcaaaagcacgagactcataggttgctgactcaagtcatcttttttattgtttgtttgtttgtttgaaacagggtctcatggagtcagtctggcctgcgactccttatcctccggcctctgcctcctaagtggtaggatggccatgtgtgttaccgctacgccttgctgctgttactcattttgatctggctgtcactcccatgagctagttacttatctggtgactctctggaggcctcagagaaagagcttaggggggggtggggagggtgggtgtgggtggggggggggggggggggggtgggtgggtgggtggggcatggtgagactgaatgagaaatagcaactccacagtttgccctgacacaggatacacaggaaaaaaaaactgagaaaatcacccagtcacactatccacgcatgcatatgcaacatttcagaccctgaagcaagagaagaagtcttcatagtttgcaagaacactgacagggagtttgcataatagagtggagacaccggaccagaaaaattggaagacaaacaggttttcctccagcactgaaaggctcctttgctggctctgattgtgtcttaggctctgaacagtggtagttattgctgtggcttgaatatacaacagtcatataggcttctttattatctgaatgcctggctggcacctaaccccagccctaaccctgagcctcttcagttcccagagggctgtgctgtctaaggacagtcctaggggtctagagccagattggaggaagtgggtcactgtgcacggtccttattatcctttgttgattctggtctctcttggcctctccttcttggtctgttgttatgagctgagacactccactctccgtgatggactgacctctctgaggccctgagcccaaataaacaaccatttcttttttgttagacatttgttcatggtaacgaaagactatttatcacagttaaaaatgaccaaaaaaaaaatcatgaaaatttcccccatgttttcttattcaaaagatgtcaccatcattccagttgtttctgtgggttaaacttgaacccagcactttaacagctggcttcacatcagccattcacaaggcgcaaaaaataccccatttttctgactccaaattcgagtactgaaagtatcaaaggccaaatagtctttgtaaatacttccacaatgaaatgttaataatgaaacattaagagactgagaaagcaaacaattgctggagagatgactcagcacttaagagtattggctgcttttcgtgggacatgagcttggctcccagcatcccagcatggtggactgtaactggctttaactccagtttcaaggaatgggatatccccttctggtctcaggcatcaggcacacacatggtgtccatacataccagcaggcaaaatactcatacacattaaataaatacgtaaatatttgaagatattacttgaaaatcctcatctgaatattaaaatgtttatttctcaataatgtatatgctatgaaactaacctttggggaaatatccacttagaaaagtcatcccaaattattgcaatcatttggcaattgccatttaataacagcgtcaataacttgaaaattaaaaataaacaaccaggttttatctgaggttaatttagctatccaatcaattatttagggatgttttaataatgccagctagttgggtgtggtgttttggcatatgctcataatctcagcaagtgaggaagagaaagacagtgtaagaccccccaccccgaagctcaggcccccaggatctcagcccaggaccccagtcaccccaatcaccaggcggagtggaaagcttgatgcaaactgcaccaggctttattgaagttgtttaatgagctaacccgatgttagctccggtctttcatccacccatcatggcagttagctaggaaagacagctcaaagtgggtgcatagagattttatagggcagtgtaaggggagtgtctaggggtacgcacaggctcaggattggtgtgcctccaggcttggaggttttgccctgtgttgattggtcaactggttgttatggcccataggccctcccagggcaattgctatgctcttcgagtcattgtcgtgcacttgtcggtaaagcacacccagagctgtaaagcatagcaccaccagctaacttctgattggttccttgccacaaggcaggcatctgacctcctagtgaccaagacaaggttaaggcaagcatgtgttacagtcatggctgccgaaatggggagctggtcccttcaacagaatagagtttgaggtcattctgggttacacaaggagtttgaaaccagccagggctgcatgtctcaagaaagaaagagaaagagaaaagcagttagtaaataagtaaataaaattttgccagcagttgacagtgactattactgttgttattaatttagcatgtaaaataatgttttaataatgatattttaatgtttttggaggtggacaataaataactatttgaaggaggtaaagacagtcctagataaaccataattaggctctgggtctgcagcatcccaacccctccacaatcgctgaagctagaatcagtcagtcagccttacaaggcaaagcttcttcctgggggtgttggttcacatcagctttctgggtaccacagtcctgttgcggatcccaggaggagatggagaaccggtagccaggacagcgagttccaagtgcaggaggagaccctgtctcaaagacaaagatggaagacaccagacagtgaccttggcttccacaggtatatgctcagatgaattacacacacacacacacacacacacacacacacacacacacacgcacgcacgcacgcacgcacgcacacacgcgaccagtagaggtgagaacgcttccatcacaagaagccattaaaagactaaaagcaaaaggagacagaagtgttacagtgaaacagagaggattgaaaacaagacccaggactttagaaacctcagaaaaggaaccgaaaggaagcacgtggggctggggctaatgcacggcgatctggtctgatttgctctacaaatccaaggcacaggggtcccatctggcttcagaacactacactgtctcaccaagtaggtccgtaagcactggagcaccatagacctcaacgttaggctgagtttacagaatgcagctctgaggcaggcagcccagagagaaccgatggtgcccgtcagcaggagcactcccaggtgccctgcaatttgcagtccctggtgcttgacccctccaaaccataatgataattgctgctgtgtcgccagctgggcttccgaacaactccagggttagtgccctccctcactaaggccgccttggtagtgggaaccccacacgtctgactgtgataagttactccgtgatcgtctcagcagtgctcagtagcaggcattatatagtatcaccaaagcagaaaacattgcttcgctttcctcaaaaaataaaaatccaaggcttactgcttcaatatattttggtgaagagaagacatctgtccccttttaatcacgtgcacagtaaatcaagtatcaaatttaaaacaatgaacttccaatgagcctcctcaaagtcacttagcattgataaattagtaatgtattattaaattattcatatcttttttttcctttggactgtaatgatatactgtacactgcactgataatttacttaggctgagtccattcatttaattatgctgctaaacttggtaggccaattggtcatcctgagagtttccaggcaagctaatcacaaatatatagaacatgccccttattgtccccagcggctgagtgctaaaatgctattcaacgctcggaaggttaatgccctgcttatgtaaattgtccaatttaacattcagtggcaatatcataaattctggctctaggatttcattaaacgtatgttcaaactagttgacctcaaaggttaacaagcagaagttaaacaggacaattacttaactcacttcttatcaagagacggaggtgcaccagctatttaatagcctggcatacttcacaattagaattcttataaggcctctgataaaactgcaggtcatgaattttcataaggatgtcagataataactatttatctgcgcttgtttttctttcttataaacttaaactttgatctcaacattcaattagacatgattctgcagagaagggttaggtaactggaggagacagggtcctttgggtctgcagggagatttaaagaatagcatctgtattgtcatgagggcgggaaaatggcagagccccactagtaagtggatggctaagcaccgctcactgtcttcagatgctgagctaaacagtgattgttttctttccagacactctcccaccaccaccaccgtcactccatgtctgttagcctactgggcggaacacattctcctttgtgcttatatgacaatggggttgatatgatggcagcaaagtctagataaccatgggaagtagacccgagtcttctgcttccttctcctcaccaccgtgaaatgatgagcacagccctgggtgtgattacctacagctcaggcaatgcagtaagagaagccccaggtggacatttccacacacagtgctgcacaaggagcaagcactggctttggggagacattaagttaataactacacaccagcaatcttaacacttgacccactaacagtaggacacagcaagggcctgcaggggtggctcagtgggttgtgtgtttgctgtgtaagcatgaagtccttagttcaaattctcatcagccatgaatagacaggtgtgtgcataagtgtctggaactccagcattgtggtgatggagtcgggtggattgctgggactttctgactgccatcctagttctggattcagtgagagaccctgtctagagggaagacggtggagaatgatggtcagggcaatgaaagactttccctagcttccacacatggacacacacagctacacacaagtgtgcacagaccacacacataaattagcaatcaatcaaccaacaagtaatcaatcaataataatcaaccaatcaagaaataggcaaataaataagtaagcaaataactattttttgaaaaacacaaaaagctgtatccccttgcagattcaactgtttgtctcacaccctctttggtagacaaagcaacggatatgaatgcacaaaattttgtttataaattatgaactgaattcctctttggagctgaaaagaggaactgaaattcctctttgtcattttgctcattgtcatatttatcggagggttagtgatttctaaaatttaaaagtaatgccatgggatgaagacaaagcataggcatgtgtgcagatatgaaataagcacaggcatgtaggtagatatgaaataatgcccgcccttggtcccgtccctgctctgtgctcttattcccctccaggggctacttatcgttagaagctgtttagagaaataatacaaggaagaaatgtttcctaacatgaaataatgggacagtgttttatatctccatccaaacttcgtctttgaatattgactacaggtccccttgaaggggacataaataaagtggaaaggctaattgagtgaaaacacttgcagtcagggttccgtaactgacattggtgatactccctcccccacacacgctcacaccacttaaagtaagagttagggctctgttctcagtgaaaaggctggcatacataagaaaggaatgtagagtggaaggagccaggagactctagtcccagagagggcggggggggggggacagagacagagacagagagacagagagagagggaacttctggaatacatgtatgcttgtgggttaaaggtagagacaagagggcccggaatgttgaggaccatttctttacacggtgtgaagatgtgtcactgtgattggctaggcaggaagcgtaggcgggacttctggacagagagctctgggaggaggaaaggtcgagtctccagacaaaacagactggaagcaagatggggtagtctagagtaaaggtagcttagccacctggaagaatgtagatttaaaactgggcttatttaagttagaactagttaggaacaagcctaagctaaggtcaagcttttataattaacaataagtctctatgatggttttttttttgtgagttggcggtccaaagacaaatctatctacactgaaaaagaggcaacacaaggcagatgaagaggatggggatggcatggcaacgcggaggcgggcacctttcagagtggtggaggttttgccggctcttagtgagcttggcttgtggagctaggatctccggaacgctgagggtaccagagctgctctgagccagtgcctttgggttcttatcgtgggaattcaaagaatgaaattgatgagccccagaggtgagctgtagatagatgataggttccccggggagaatgtaagaggacagagggaagacaaggcgcagcagcagtggtcccaggaagaaggttgccattgagcatctacacttgggatattttaaaggactcctggcagacactagtgtgaggcataggggtgggaccggttggtcagtccagctggctggacagttacaatgctgctggccaataactaggatttcttatttgctagcttagtcttaattatcaaccataactactaatctatatatttttataaggacttatcttaccgggtaggatgccttttatcccagcactcaggaggcagaggcaaccaaactcctgtgtgtttgagtggcctacatagtgagttccaggccagccagggctacataatgagaccctgtctcaaaaaactttattagcatatttattcattaaaataaaaaccattttgagctaggcatggcagtgcacacctgcaatcccagcattgggtaagtataagcaagaagattgtcataacttccaggccagccactaatgcatagcaagaacccgtgtcaaaaagacaaagacaccaaacacaataaaaagttagctgtcattacaataagatgagagtgataaaccagaggaagctttttacctgcttcccactatttacaaacagtggaagatgagtaattttcatttattttagttgcatgtttcacatagcaatacagaatagttatcttcaaaatttagactttcaaaaaaatcgttctataaaagacattcacatataagtcacaactatattatacaaattacagtgtaattccaaagtatacagaatgtgtaagcctaatactgtgaatgggtattactggagagaagctgtggctacacaggctgactgactagaacttcagtgctgtgggaaggtcagaatatctcaatgttcacctcatttaatagccacatactgcccactgccttagttttgtttttttattgctgtcataaaaaatacattgaagagccgggcgttggcagcacatgcctttaatcccagcactcaggaggcagaggcagaggcaggaggatctctatgagttcgaggccagcctggtctccagagcgagtgccaggacagcctccaaagctacacagagaaaccctgtctcgaaaaaccaaaaaaaaaaaaaaaaaaatacactgatgaaagcaactttggtcgggggattatttgtctcacaattccaggttgtaatccctcattgtgaggaaatcaaggcaggaactttagcagctagtcagagagaatgaatgactccatacaggtctagtactcagctcactttctgcagtcacataaaagtctgggacccaagcacatggaatggtgacacccacaatggtcttccaacaccaactaacagggtcaagacaatctctcattgggacactcttcccagatgatcctgaattgtatcaagttgttgatgcccacctctgtgtgtgacataatatccttaccaccactgggggaatctttggggatccatgaacatatctctatactccaccaaccccaacgctaagggtgtcatcagagctcattggtggcctgaaacagatttccctgattgctgtaacctggccgtctgaagtttctacccatctgtttgaaaagtgtgttgattggagactttctttgcttgtataattgctgccacatttgaacatggaagttgaggcaacctggattggtgtttctggtgtttactcatatttggctctagagtaaattatcccctttgaggagagaattgtgtttcttgtgttgatgacatccactatttgtgttctaattggtagggccccctccctcgataatacaataataataaaatacaaagcgatagaatccccagatcccactttctttgtcactaggcatgttgcaaattcacaatatcagtctatatccctatgttcgtgcaggcaggtatccagaagtctgctggagggtcacagaggtttggaccgaggcagtggtgagatagtggagaaaggttgttagttttagatttgatcactctttcatctgtgcctcatggactgacttctaccgattacacgtttaccgcagctgctgaagcctcctcttcttactacttagaaagggcaattcctgtccttgaattatttttactaagtctggctttggacttcagtgatctgaagggccttgtttgcatttcctgggcttcatatgccctttagacaccccccaaggtgcagtttgttaaaatgaagtcaaaacagcacctatcactcactccactaatctctacttgaaaaaaaaaaaaaaaaaaaaaaaaacctctgggataaatggacgtgtttacaagagaagatactgtagaatccgccacacccggagtatatgctgaagtcaacaaaatcatctcatggttaccgcatggaaaaatcaacaattattagaatagatttatgaagttatttagcagctttctggccagcctcattatgcccaccctcacatggcacaaggccctttccattagcagaaacaggaacaaaaggtcagcgcttccctgcaagctccaaccactaattagagagaccccttggtagagaatgtaattgggccattactgaatccttctacagaaagaaaaatgcatgatttcactcttgttggttttcctttgagtgatgcacagaccattaatagatgttcaaagagtaacatgggtattaccgatgggttttctaaatatgaacttccattactggagattcagttaatattcttcatattaaaaagaacattcttggccaaatagctgtttaggatggcctctgaatcaaaagttaacccaagtagctattaatagcttgggactgtagccattgcttgaatatactttcgttccttctaaaattgaatcctcatagtgagacattagaggataaaaatgtagcagatgctatttagaggttgggcctttgggaagggaccacagtggagaccccgtgattgaactctggtgccttcccaagaaggagatgggctgtgcatgaggtttgctggttttaaagcttatacttagcatgcctggaattctgtcatcagttcccaacacaagaaaataaaaagcagaagggagagaagaaactgaaatggatgtgtattccatctcccacttgccctgggagacattgctgtactaccttggcatcctgccagcaggcagtccaccacagagtgatgcatgccccttacctaagacagagttctaagccaaaaataaacttctttcttgtatatgccagcctacggtattgagatagtagcaaaagaaaatcaactaaaagtgaatcccatgttcaggaaatactggcattgagatgaaaagtctgtcagcagggacactaagatttttttaaagctaacaataatctggcaaccccccccaacacacacacacacacacacacacacacacacacacacacacacacacacacacacacacccttattgctgcagatggaactcagggctttgtgtatgctaggcaagcactctaatgcgaggctagaccttggcttgagcactttcttcttcagtgtgaaatggtaactggccacttttgtagtcttatggcttgagtgtgaaatccctcacaggttcatgagttaaacaacaccaggggttattttgggagtttgtagaaactctaggaggtggcacctagctagaagtgtaggtcgctgagggtagtcgtgttcctatctctccctgtgtttcctgtccaccacgagatggatagctacacacttcacatattccttctgccacaggatgctctgccaccaaaagtctcagaaacctggtgctgtgactacagatgaactcttctgacaccaaaagcctagaccaagtgggaggatggagtccagctgcaaggcaggagagcagaatctggtctgagagcagggaatggtgggatcgaggtccagacaggcaaatggacagacaggcaattaagtaagctgtgtcaacaacaggggaagggggctgagctgggctgacgctcctgggacagatgggagttctctgcctactgtgtttttgtacttagttgtagctgcttcacttttctagttatgaacatcacacatacaaaaagataacccttctcttactaggaatccccagtgcctaaatcagtaactggtgtcttctcagggctcagtcaagtaccttctggttgaacgcacaaaagaatggcgggcttagaaaagttcccctgggctctcatcgtcggacaaatccctgtctgttttggaagctgaggactccgtttctgaagacttaaagaaaatggctgagttctgggaggcttcttttgactgtgagacactctgttcctcaggcacagctagtgatgtacttcacaccagctgagaaggaggtcagagggcctggcaggattcaccaacccattttcctcttttgctagctggacttcagaaataccaggaaaatcttgtcatcactgatgaatgctgcctaggagctcttaactcccctagcagagtgggtattaatgggtacgttttgtgcaaggtggaatgtgtctccttgatgcatgacagtgcccagatcactaatgcaggctgtgagaccaggagtccaagaataatttgttcacatgaactaaaacttgctactcttgccagttttcacttgcttcacttaacacaagccaggtggtagtctgtccttttcttgtgtctaggaatggttttgaaaaggctgaaagcaccctgagggctcaggctggttaggaatggaggagccttgaggaggtcttaatcatatcacaagcaggggtgacatccaagaagagagtaatgacagggctggagagatgttcaatggttaacagcgtgcactgctcttgcagagaacctgacttcagttcccagaacccatgttggacagctcacagcagcttgtaactccagagatcagcaacctcttctggcctctgcgggcactgtactcacgtgtacaaacacatacacacaattataaatcaagcaaatcttaaaagccaaacgaaagcaacaaaaagagactaatgatgatggggactgtccctttgtacagagtttcaaaggacttagaaacctgtatcttgaaaagagaaatttggctggggatgtggctgggttggcaaagcgcctgcctagcatgtgaaaccctgggttccatccccagcactgtgtaaaccaggcatatgtcacaggcctgcactctcacctcttgagaggcagaggaaggaaagtcaggaattcaagaggttcctacgttcaagaccatctttggctattagaaagcttgaggtcagtctgggttacatgagaccttccttgtttcagaaagaaaacaaaacaaagttagagtactcaggagacttacaaaaacaggactttgaagtacagactttagaagtagctcaatttttctttaaaaaagaaatcacctggcttatgaaagtggagttctagttactccttcatggatctcaaaaccttatgggattcaccatatcagttgctcacttttctgtggttgagatacaacaccatgaccaagagcaaagagcgtattttggcttaggttccagagggagagtccataatggcaggggaggcttgctcagggccactagctgacaactgccacacacttctttatcgcagggttcagataatgttagctgtttctgggacacggggttttcctcatttttactgaaaatagatttttttcatacaatatattctgattacagttttttctccccatgtcctccccacttcccctcctacccaaatccacactctttctttctctattataaaacaggcatctaaaaaatagtaagagaaaatgaaaacaaataaattggacaaaacaaacaaatggaagaaaaatagctaaagaaaaagcacaagaaacacttgtagaggaagagacacgcatgttcacacagaaatctcatgaaatcacaaacttagaaagcagaatatatacataaaggatatctaaagttaaaaacaaaaaacaaacaaacaaaaaacagctccaaaaatgtctgttgagttggttttgtgttggtcttctactaataacagcatcctagtgacagtggatttctacttgagtctttgtacttactatggatcattgtaagaggaaaataatgtgttttctaatttttgaatttcagtgctacctgggaatttttattgcttatttttatttcatgttttctaagtgttaaaatgcaacaattgtaagcaggctatgcagttcagtggccaagtcgactgtggtgcagagggcttaagtctgagtagatttgttgcctatgtgattttgaacaattactccttttttggttttctcatctatgaaatattaatagcaactagctcattggttttggtatttttgttgctgtttcccctgtttgggggagtgaaggggagagagaaagaatatgaagttgggttggtagtgaggtggggaggctcttggaggagttaggggaggtgagacacaatgattaaaatatattgcatggccactgtggaaatcagtgtggcgacccctcaagaaaatggtaatcagtctaccacaagatccagcaattccactcttaggcatatacccaaaagaagcacattcatacaacaaggacatctgttcaaccatgttcatagcagcactatttgtaatagccagaaactggaagcagcctagatgcccctcagctgaagactggagagagaaaatgtggtacatttacacaatggagtactacacagcagaaaaatgcaatggaatcttgaaacttgcaggaaaatggatggaactagaagaaaccattctgagcaaggtaatctaattacaaaaagacaaacatggtatgttctcactcatatgtggattttagacatacagtaagggattaccagcctacaatccacactgccagagaagctagtaaacaaggaggaccctaaaatagacaaactttgtcccctggagaaggggaaaggatcaccatcccctgagcaaattgagagcatggaaagaggggggagggagctaggagaatgagaagggaagaagagaagggatgcagaggtcatgagggagcagaaaggttgagtcaggggaagaatagaagaaaggatatgcgatgcgtagggttttagttgggggggtggtaggggaggacgggagggagaagggaactgggattgccatgtaaaacaatcttgtttctaattcaaataaaaaatgattaaaaaatatattgtatggaaaagatgaaagtaaatatttaaaaaggaacaagtgctgaatatgaggcggcagaaagtagcctcagggctggcgcagtgtttaaatgaaagcatcacactgctgaagagatgtgaccacaggaatcagcaatgagtcctttaagttgaaccagaattgctcttttcagaggcttaggctggaatctgaccgggtcctaaactgtctttacaatgccatatctccggtgctacttttgaaatgtcttttttttttttttggatgtatatatttatttcctgcctagacaccaaccaaaatacattgaagtgaagattcctattttctgttgcttttctttttcttccttcttctccttctcctttttaagacaaaatttgggtgctaaaccattgaataaggaaggaaaatctggatggagtactggttgctatagacaggggctgggatgtatttcaggtgataagatcctttcacagcgctggcgaaaatccttgtattttcgactttcgaagaaagggtggagttcgagtttagttgaatgaattgcactagataggatttaaggcttaatttaggagggtaaccccattgtcgcccccaccttggctaccacagcagttgtgcagtttatggacggtgccaggtaggactagggcgggactcacacccggcagcaagaatttctactcagaaagcaccgcgctctggaacactttttagaaaacactgggtccgagaagaaaagaaggaggaggaggaggaggaggaggaggaggaggaggaggaggaggaggaggaggaggaggaggaggaggaggaggaggaggaggaggaggaggaggaggaggaggaggaggaggaggaggaggaggaggaggaggaggagaagaagaagaagaagaagaagaagaagaagaagaagaagaagaagaagaagaagaagaagacgttaaaattcgagtttgcttcctgattgtgccactgtgctgctgttactcactcactggtctcaagctagagactgggaatgcggttcctaactcagggagccgtccttctgcggaagggggccggccggaccggacacagaggccgacttcagaggccgccgttggggcaggggtgagacccagaaccgacttcaccttcgcgggagaacacctggcgatcaaaacgtttctctgtttacacccgagggtccaagccgggaacttcaggcgggacaagcgtgttccggaactttgtcacaccggaacgagaggaggaagttccttgcgttgcaacccgattgaattatcccgaggggcacttccggcgggccaaaatggccgcgaccgttcaggactcacgtgtgcgcgcggggaaaaagctgaagcgttccctgaagaggaagaaaaagatgaaactggtagccaaggccgaaatgtcgaacccggaagacgagctcaagcactcttccgacggagaaggtaacgcggccgagcggagctccccgaggcccgggctgcgcttcccggcgttggcgtccgtgggacgaggcgcctcggctcgcagacgcccggctgtcggggctcgatccctaagctgctcctgagaaacggcagcagcgaggcggggaaggaagggtcagatgggctcggagagcagggagcaaaactagaaaaggccgcgagagggaagaggcagggttacagtgcagcggggcgggggcagggtagttggtactcagtgagtgggaggagaggagtgcttggtagagagaggaacgaagcggcgtttgaccacggtttgagaatggaagggagctgtgttgggggaggtctttcaccgtgacgtgtccgcccttgctgctgctttcggacttcgtcgttcttgtcaccagcttcttagctgagagggaagggtagacgtttgcgtcctacgccccagtggggcagctggtaactcacatcccgcgtgtgtctgtctgatcgtgcgtgtccagtcattaacgaagggcttcacctcccggagtagcagcccgtgtttttaaacttgcccgatgtggctggtctcctgtcatcacctgcctctccgctgcttgataatggctgttttctgtgcataatccttgctcgcgcgtggggcgtgccctcattctggagttactctaccttttgcctggactgcctacaatactcttcagaagcttgcgagtccgtcagatttttcattggctccagcctctgatccactggagacttcttatgtttctaatgcgccacggtgctccttgtcaggttcgttttgtggcttactgccctgctttctttagatttgctttcttacttttaaatgacatgcatgtgtgttggatgggtggtggcggaggcagggggcttgtgaatgtgagtgcgggtgtgccactagatgctagaggtctcagatcctctgaagatacaagtggttgttagcagtctaatgtggatgctgagaaagggaccctgaagaacatgaacttaactagtgagcatttctccagccctaccctgctctttttaaaccaccgcttttcaaatctccttaagtgtgtttgctgtttggaagttccatgagtccacagacagttgaccctcagctcctaagacaacacccatcactcagggcttctttcaagggtgtgtaaggaaagggatgggtgaacttggaattcaggaccaagaagtaactgtcataaactattgcatcgtaatgaaaggcctcggcccttgccagaggtgttaagagaaacaaactgcttagcaggatttggagcctctggttctgatgctgtttttaactccatttacttattttgtgggtgctcacacgcagaggtctggggacagcttacaggcaccgttacctcagagtcattttacctgctagtgatagtgttttgtatttaaggttgtaagcattgcttgttttgagtttggagtatgtattttagctgttaaccctttaccacatgtgtagctggtaggatttttccctactcttctctgtcttccctgtgttacttctctccttcgccatgcagaagctttttaattgctgctgtcccagctgtcagttcttcctactacatcctgagctgttggaggcttatttggaaagtcattgcctgagcattatcttgaggtgtgaaacctcttttaatgtaaccgtttttttttttttttttttttttgacacgtttttcttagacaagcagacagtcacccagggtaaaaataactgtagttgtatgcattgtaaacttgaatgatggtaagtgattcaggttaacttttggtaagttgtaatactttccagtaatatttaagttatggttgtaacaaaatggaacatgctcatgaaccagaaagacatatgaagacatagaagtctatgtcttttgggagaaggtagggaaggataaatgcagtgctttgcacttgctagacaggtgctctaagcggagctgcacctcagctccctctcgatactggtatgtgtttgttgccagatcttattacaatgattttttatttatttatactgaatattatcattttcattagcagcaaatgctggactcaaaccccgagtctgagcttctttaaaaaaatagggatttcttggcttcttgtgttccctgtctttctttgtgtctgctgcatgtgagtttccttacccctaataaaggccttcaactgctggaaaaacaaaccaaaacaagaacatcactttttttcattggtaggatgtgtataaaataatgctgtaaactttttacaggttggtgcctgtgttgtattcctccagtaggtggtgagctgcagtggcttgcatcatgggaagacttctctgcctcagtgtggctcattgctgcctttgtgcaggttcatcagcatgaacactagatgtcagtgttgtagttcagacgtttgctaggagctgataaagcctttgttgcttctaatgtcccagatggtgttgttcttaaaacttttagtggttgtatctctttatatcatgttaaagcttactaaaaacctactttggggtgtgtgtgtgtgtgtgtgtgtgtgtgagagagagagagagagagagagagagagagagagagagagagagagagagagagagagagagagattcttaaaagctgctgactctgaggactaaaacatatacatacatacatacatacatacatacatacatacatacatggtttttcgagacagggattctctgtgtagctttggagcctatcctggcactcctctggagaccaggctggcctcgaactcacagagatccgcctgcctctgcctccgagtgctgggattaaaggcgtgtgccaccaacgcccagctcattaatatatttttaactagctgcattatttagatgttagtatacaaagtcctcagagatgcttctggggagaatttgtgtggtccttggctctttttgctgattgattacactaacctatatgtaggctttgctggcagattgcccttttccctaactgggaaatccaaggaaatgatcaatatggcacctgaaattttcatgttacagtgtttgggatttggatttttggatttagggacgcctgacttgtattcaaaattagtacctgaaaggcatgcattgtaacccgtccctgagtaaagtgctaatcagatgtttgagctctctctctggggcttcctcatggtgtaacctgcagcacacctaggaacttagcttggaggtcagtatggccattgttactcagcactgcagttcagcttcctgactgtatcatgtggtttttgttttcttcctcccaaaatgtaagaaatgaccaaatcacaaaattttattgttgtatccaccattttaaaaatcaggctgcttcttcgtatttttctggacacaagttcagagttttaatatgtggggcaaaattcttaggaaatggtactgtggcactaaaatgtctttcttaaccagttgatacttttagtccttccttccttccttccttccttctttttttgaaacaggttatctctgtgtagaccaggctggcctcgaacttagagatccacttgtgtctgtctcctgagtgctgggattaaaggcgtgagccaccactaccgggctaatacttaagttcttaaaactaatcttggttagtctctttggtaagtttagaagtcaactgaggtctgtgtctgaaaagctctctgccgggcattggtgacacatgcctttaatcccagcactcggaggcagaggcaggcggatctctgtgagttcggagaccagcctggtctccagaggagtgccaggataggctccaaagctacacagagaaaccttgtcccaaaaaaccaagtaaataaataaataaataaaaagtaaaaaacgctctctgtattggacctccccatctcccaccgtccccacagacatgaagtggagcacttgttggatttatctctgcagcctgggtctcgaagccactctgatttccctgtcagtgttgtgggctgctgtctggtgctgttagcaacatggggaatcctggtactcctgtgcgtgctgcagacagtggctccggagtgcctggcagggcactaaggtttaatttatgtttactctcaggttcagaaggaagcggtgaatcagaaatggaccagttgtcggaggatggcgcagtagaagctgacagtgaggacaatgttgactcctgtgaagaagaaaaggaagatgcagagccaagtgctgggactaattctggctgggcagacgccatggctaaaatcctgaacaaaaagactcctagcagtaaacccaccatcctcaccaaaaacaaggagctggagaaggagaaggagaagctaaagcaggagaggctggagaaaaggaagcaggtctgtctgtctgcctgtctgtcctggccttggagtttgtgccagcagcattcagctttaagggcttcttatgtgggggtttcagggttagcagggttaagtcaggaacacagtcttgtgctgaccattgagcaagcctagccctgcagtgtaaatctgaatattgaagagcctgagttcagaatggttttctgctaacagactgaattcttgctctgggcagtcactgatggtagaagttagtccaacctcgattaaagacctatgtttgcatgtaagttggctggtgtacagtataaaagaagctatgctgaggttttcgtgtcctctgtactgtatcagtgtgtcaataatatttggttataaaagtaagtaatttctaatgaaagaaaagtaactttccgtgtttgtactgacagtatagaagtacaaacttccaaggtgtagtttctgtacaaatgaaagaaagaggctagaatcagagtatattgctttttatgtctggcacacccttgttcctctggttattccacttaggagttgtcgagttgggcttttccagcattgctctctggacacatgggttgctgttactggtaattctttttgtgcgttaggataaacccttgtctctaaaccttacaaggagcttctcccttgaggtttgagtatttgtttattaactggccaaagttagaatcagttttaaaaatgacagaatctaaagtcacctacaatctccagattccagggagggcaagcatgcagagcggagggcgggtgtgtaggtcactgagtgctggagatgtgctgtgcacgggcgcatggaagtgcgcttgccgatagcctcagtggcagagctggcaatctctagaagtcagtagcaaagccacgtcacttgtcagggttgtttctcactgtgtggtactgagtctgctgacttggaagtgcactgaaggagaagaatgccttttctaaaggagccaggctgctctgtgtggtcagatctggagtattagccgtgttctgttgttgttggctattttcttttttttctggaactctgctctgtagaccaggctggcctcacagagatctacctacccctgcctcctgagtgctggaatcaaaggtgtgtgtcactaccacccagccttagccatgttcttaccacagaagtagagaaaagccagcatttcctacagttcttggtgtaaatgcttaggccctctaggcaagcagttcatccggtcagtgtatatcagcttgggaggcagatctggcagtctgtctgtctgtcaaaccaggctccagtaccgggatgttgttgaagtcccttttacaccagcccgagtgttgtctgtgggacttcttcctacagctccccttaagtgcttgcacagtgtaggaaaacagtcatttgagtttgggattcagtgtgatgacagcaatgttagatggctgtgagaggagagaagggtgtaaagggctttatacaaagaaaaatagacattacgtcagtatgtgtgtatgatgttgttctgttcagagctggtgcagaattcattctgagagttggtgaatccaccctgaaggtaacaggcagcttagcttgcccttactcgagtgggcagtgtggtcttgtgcatcccacggatggtgggctgtggcatttgggaatggctggctcaccctgccttgcactgcctggctgtgtgtgtgtgctggcagttctccagaacctgatgccaggactcctcagagactctgcctctcacatgacatgctaaccacaggctgtgggagccagcccctaaaactgtggttttacaaacagcctccgtgacacacagaactggctgatttattacctttgtcctttcacagaatatcatgtcaaagtttgctgcactttgaaaaatgcctaataatctttcacataaccgtatttataacacagcttgataagaagagggagtgggaaatgatgtgcagagtgaagccagatgttgtcaaagacaaagaggcagagaggaaccttcagaggattgcgacgaggtaagacagtgcttctgcctttaaggacaagtacaggaaagcaaaagcaaaagctgtgatggtgcactctgccttctcagagcccagtgacacacctccaggccctactgctggacaccgaatgtaaccagaaacttcagaggtgtcatgaggcagaaccatagtatgctgagtgtgtatttggtttgaatctgcccattttatagttgtggggattgtgtagtcagatccctgactctatttgtctccggtgcttgtctaagtgcatggtgctgggttggttcgcttacgttgtaattacaggatgatacatcacacattctgccagctttaccttggcagcctttttcctgcaatccctcacacacacgtgagcaccgtacactgtcaccttccatatctagagctgaatactcatcatctgtagaagtgagccttttgagaacgggttgtattctatgtacagtgacaaccgtgggagttggggaattggggaaggcttcacagaaggcaacattaaattgctacttaaaaaccacaactatatttagtggagtgatatctagcttcagttgatgttactctggtcactttctgatctgtgtgggagttacacagtgagatagataccagagagtctctacatgctatggatttctctgtctccattcctagcctgtgaggatccccagaaattgagacactgtaatcattttagtttgaaaaaaaatcaaactcaagttttcaatagctccttaatcattattatttttaaataactatatgaaaacgtagcttattgacatattggattcaacatgctttacagtaaagtaagcttactacctgatttgactaaaagcgacagtgcccattaagtccctatactgtcgactaagcagaccccaatcagttcagctcagtgtttgctttccagaataaattagcatatttgccacctgagagtgcttgcctttttctagactgtggtggtaagacagtattctgctgtgtttgtcctccattgctcgctgtttcacactccaggggtgtggtgcagttattcaatgctgtccagaaacaccaaaggaatgttggtgagaaggttaaggaagcaggaggttccatcaggaagcgagctaagttgatgtcaactgtttccaagaaggatttcatcagtgttctccgaggaatggatagtacaaatgagaacagttctgctgctacgaaccccaaagccagacaggtaagaaagactgcatggtgggaatcacacctgagacactgttaaaatgtaacagataggcgtttgtttgttttggaaagactattgttgaaatgagaagatgtcagcagccagtgttcctaactcccaagtagaaatttacaaacagaaagaggagccctttgcacaattttcagcaagccggctgtgttcattgcttatgaagttagaaaaaataagttgggaaaatgtgtgatgatgttagcaggaattgtgactgtcatgagccctgtgctcagagtatgggaacccagcctgggtttaaagctgttgtgaagtagatgccttgtagagagctgtgtctgccagtttgctggtgttccaaacactgtgtagctgtgtgtcagtgtgtgggaagactcctgcagacacatccgtggtgtcagtcagactgtgtaatatgtgcactgtgtgtcagtgtgtgggaagactcctgcagacacatccgtggtgtcagactgtgtagcaggtacattttaaacacccctcactttgggtgctcttaggccaggctgcaatggtatgtcagctgctggacgttcctctccaccccccattgttggaacccacaggcaaataggactaacccaacctcctttctttcttttttgtcttcttctttgtagaggttggcatgtaaggtgttttctgatgggccatgagggatttttaggacagcttggggtcagattgtaaatctcattctctgtttagggatttggacttgagttcttagagtccgatttcaccgggtatgtactctggccagatttgattgtttttaaggaaaacaaaggggttaggggtggcaaggtagtttcagtaaaaggccagctttagtggccagcttatgggaggccactgccagaatcatcaagaggggagaggctgaactgaggcccacatatgtgggttggaaaggcggtggttattggtgtccagaaaagaacagattgcagaggcagatcaaaggttggaatcagtttaccttcagtctgacatggtgagcaggatttgaataactggttcatagtagggaactgattttccttaggccataggccttccttggactaggtaagagatgcctcacataggcatctgtggctgggcactttgtgtagggtgctgtgtgaggaggcaatgagtgcttgtgtttacaaagttggacttgtagagatacgactgtttttccatttcagataggaaccttctggaaggatttgttttctcacagatgttaaaatagtaaagattttcttaagattttgtgacgataggttagtttattttacttatccttaaaaaatgtgattctttcatttttttttttttcttcaaaagccagataagctctgattagcttttgtgggatttagttctttccccaaagccaggacttcatgtgcagtattttaaatgtgagtttcaaaggagactgttggttgctattaagaaagcattgccctgtgacttctgcccttagttacagactttatgcaagatttcattcatcagaaactaacactatgttagaaaggagtagtgatagctggctgcatctacaggacagagatctcagaatcagtgcaggacaaccagtgttggtgcacattcttaccgaaagcagtcattggcctagtcggcagggctgtttatttctatgatatagaattgtttgtggtgtgaggtctttaaatggtgagcagaggtagggatgtgctgccctggaatataagcaggcactcagtgttgaggacacctccaatgaaactggcttccttggtgtctcagagcccagatcctgtgtggttaggccctcttaaagctgggctcctctggagcttaaacctgtggactccctgcccctgggtggaaagcctagaagggaggtcacacaggtctccaatggcctcagcattttcagttggtctggagggctagaagcctgggaatgtgtagagaaaggtactgtccttagattgcccctcgcagggctgtggacagggctttactcccccttaagatctgcagatggaatgtgtggaatgcctactttgtaaataatccagcttaatgtttgtttactgaaatgcctaaacatttgagtttagacaaagcaagactccaagcagagccctctatattactatgaatgagaagagttcaaagtcagtttctcattgtagtcacttacaacaacactgcagttgtgctgtaggacgctatctgacatgaatagcagttataattggagtgagttgtgtttgcagtaggaatatggcctaagtgtggagtaaactagtcactgtgaagctgctgtaaagagtctatcctcaacttgaaattaacaacaccctggctgaggttgagccttgtcttgttttgtgaagtctgcacctgtgtgttagtaccctgtagcacatactttaaaatctgaagagtattttcttgtttcttgtaaaaagtcatcattttgagcaccagacagttgagagagagtctttctggggatgttagatattgtatgtagtgacaaggccacagattctggaatctgatgaaattcaaaaagctgtattctatgtgaagaataacagcctgcaccctggaggtgagagtcacagcccagagtgcacaggacaatgtctgtgcatccagctgctgtctgaggtcatggctatttttgctttgctttgtcagtaaagtgaggtctctgtcctttctgcgtactgtcttcctagaaaataagagacagaaggaactctgccacctgcagccaactctaaagggagctgttacagctgcttatctcgctgttttaaattcaaaagattcgtaaagtaattcagtaaaaattagacttggaacattcattttacattttgagtctttaacatgtaattcttacaaaaggatagtttgtccactttgtcttgctgttatctctaactgctgcttagaaggcttccttaacaagaagcaagaaagtggattgtttttatttttattttttaattgttttgttttttaagacagggtttttctgtataacagcctgactgtcctggaaatcactttgtagaccagactgaccttgaactcaactgcctgcctctgcctcccgagtgctgggagtaaaggtgtgtggagactgccatactgttatcagggtcttgctttaagaatgtgttcagacctcactagaagatcacacacattctcagttgggaatctgctaggtacatgttgacacaggacctcagttagagtaagtgggcctgggaagttttactgtgtgctaggtggtgtgtaagtgtcctttctcgattctgctgttggaagtagactcctcttagaattgaaaagcccaagtcagaaccagtcaagacagtcaatccagctcacactgaccacattcagtggagttgagactcaaatgcagcatggctctgtccctgctgcagtcactgtgcaggttgttggtgctgctgcctgcacagatctgatcgaagtcacgggagcagacacagactagaaagagagctggagagacagccgcagcctggacttttcctcggctcctcatcccatgcttttgatgtagaagataatggaatgcctgtagaagaatctttgtaaatttacctgttaggattggctttttagttgttttcacaagaaattaggattttctagaaagcaagtgtatttttttatttaagtattgggaactgaatgcaaaatgtagactaccttcttccacgttatttatgaaaaccacataggaagaaactctaactgacagtagtgtgaggatgcctgcttctcttactaggtctcttaagtcattaacccttctttgctttgttcctgttttgcctgcccatcttctcatttaaattttggttactgataattgaagactgtagctatgtgtacaccaaagattatctttaaaaattagggctttgagatatgattcacataccataaaattcagaagatccttttataactttgagtaccaaaatccagtcaaagttaacatactatatttgattttatcttgtcattcattctagcccagtaaacaactgacaaatcaaaaacaaaaataccactgactttttaaaagaaacaaggtagttgttttgaagaattaacgatgaatgtttgggtttcatttatttgggtttgttcgtttatcattgtgccttttaagttgtaagctagaaagtaggacacttactaagtgtcacttgctaagggtttttgaggaccagggagaagtggcactgtgttggtactcttgtcctggagtctccatctgtagtgtagcgtctttatggaagctcttgtacattcatgaggggtgttttcagttcctctgaccagtgtgacggtgggatatcctgcacgaggagaagccattgatgttcattcccacttctgagggaaaggctgcttgtgctgttacgtacctccaaatgtgaagaaatgccctgtgtacccttcatctcatgggatgaatgggagatgaaataggctgagttaattgtaggtagataactgtagttgaaaatagtttgctagacattttaaacaaaaaagttatttagatgcaactagccaatattaaaactgtttagtttagctaaaattaaagtaaaactcactgctactagataaattgacagtaacttgttgatgactgctaaatttagatttgatcattcttttagggtttgactttttcttcagaatggaatgaggttaaattgtttaattatttgctattgaactaataatagctccagatgtcttcctcagcatgccttggctgtcagtgtgtctgaacttaaatggaaactagttaacactttaagggctgtcttcatctttaaactttacaccagctgcttctgaatgatctcgattggatatttctgtaaaagcaggccagtgaggggcacattgtttctttgcatcataggcttcttacccatgggtgtgtgcatggaggctagaggtgaacactgagtgggtgccctcctcagtagcagacagtctgtccctgtactgggaactcagtatttcgtcctcttgtctttgccttgcagcactgagaccacaggcttatgctgccataccccactgttttccataggcactgggaatttgaactcaggtcctcttgcttgcacagttaagtattgagccatctgactgacccctgctttttcttgtgctgtttctctttttgtatgtaattttcttagttttatcttttcatcctttttccttatcatcgtgtgtagtagcttcaagccagcccttgcttacccttaatgcttctaatggccactttgaaaccgaagtgaatctgaaaacaagtttctgttgcctaatcctgtgggctaaactttctgtattttaccccttaaacgtgaattttagttattcaaattattgactctgaagtctttttaaaatatatgtttggaaaccccaagactatctgaggtaccacgctatttttactgactctcaaaagggtaatacactcggaacttgaaatcactgagtaatttgttttttcactgcattttataattctgagttatgttgttaataattaaaaaaaacaaaattgaattgaattgaaaccggggcatggcggctcatgcttgtaatcctgcacttagaaagctaagacagagggattactgtgagctggaggctagcttggccatagtaatctgttccacgataacctgggttacagtgtaggaccctagttcaaattcattctccctcggtccttcccttcctccctctatccctccctcccaattgaaagctttgactagttaaattggctgtgactgttggtttcaggagccagccactcaggagcagctgtctcttaaggaggccagcgagagaaatggggcttagggaaaacctggggtagcatcagggctctgctttcagaggtcatcggggaagaggacctggctgcaccccaggagaggtttgcctcctgttgcagtccgacaagcgctgcaccatattgttctcaacagcacagggtacctggtgctctggtttctgcttagattacagcagggtgtctggtattaatactaagtcggttccccgtctaccaaatctatatgctgcctggtctctgggttgtatggctcaaatcgtgttttagtttttcattccacaaatttagaagtgatggagtagaacacccacccccccctcttaatatgtgacagtgtccttaaaaatagaggctttagcagagttagcttgtgaaaccttgccaatattttgatgcttttttttttcctttaaaaatgcttactacatatacatagcccccaaatggaatagatttgcacagactgactgtctctgtgaggataggacttggttttgttgccttggtgttcctgacaggcagtaaatgtcagagaaatgtgttgcgttacttgcataatgccacaaggtggtgccattgtattgtaaaaggaaggaatgtgcacttagctccaagtattacaccacacgaagcaaattggctacatagtttgttgcctgcttcagttatttataattttggtttgttattagtctctgattccatggttgtgtcaggtagtgagactgtgaccagaattggggagtattttgttcacacttttacaaaatctgggtgtggtaccaccttgaacaccctggttagtcttccgttaaaataattgccagggatcttctaataaattatcactgaaggctgattaatgtctagatgtctaaaattgttgccaagcctttattttctgtttttctcccagctcgaaattattttgctttcatgtgttgttggtggagttgaaagttttcttttaatctgtatttgtatatccgtgagcatagtttataaggtcatttgatgttatcttggcttaatctcatttaaaactacacattgaagtttgttttggagtatacaatttttaaactttttcttatggctaaattgatttgtgaatattttggttttataacttttctcagactgaaatgaagtcagaagagggccccgggtggaagattctgcaagacgatttcatgatgggagccagtatgaaggactgggacaaggagagtgatgaacccgggggcggcagggcagggtcggccagtgactgagcagatgggagcctccagttctcctccaaagacgttgtgtctgactgttgggagctatgaggccatctggtaaatacccggacttcctgagaacacctgctccagtgagctccttcatgtgcaaactgtagtaaaattgtgtatttaatccttatgtaactttaggcattttcccaaaatatttgtacaaagaactactttcctttcttgagcattcagatgccatttctctgggatccttacatgtgagcacatacccatcatgcagctatgtttctaaagtgctgaccatttatgattaaattgaatttgatgtaagatttttccttgtttgtactcagatccatatagctattgtgggggtgagtgatgccatttgtgttggtaagccttagaaaatctgtgtagtaaaattttaaattgtaatgtttttatttgaattttagaaacactgataaagctgtctgatatgcatccaagatttccatggaactcagctcaagagataaaatttgtgggggaactgggtcctggatatggtgcgctctctttgagaaggacccatttctctgtcttttcgtgaaatgagccctgcacgcacctgcagctgctgtgtgctgaacctagcccttcccagggtgtgctggggcacaggtgtttgtgttttgagatcagttcaagggctacaaatactctgtaactacaggagaattagccctggctggagtttgctgtcagactgaagaggactcactcgtactacttccttgaagctcacgtgttgtagtaaatgatgtggctggtgtgtttgtcattttactctaaataaccgtgaacacgtttttcccagtaacaatacaggaatgctagcgtggatactacttaacacagactaacacttccgaatagtacagcacacagctaatttgggaaagattgaaccacctacacacgtttttactcttcagaatgaaaatcacacttcgttgtcttctgctgactgttttggggccatcctaagtgtctgcagcttttcctgaagctctgatttggatgaaagtgggtggatggctgcttaggaggaacaggttgtcctggtgtagatttgtgttagttgagcttagctttcaaaatgcaagtaaggaggaaaatgttcgcaggtttcttcttgcagaaacctttattccatcactaaaatcgagttacagctgaaggaaagtgtcgcttttgagagaggccatgacataattttgtcatgtggacatacatgtctttgaggtttcagtgtctttttgttttgcttcagaatacttatgcagaaccagtgtgtctgagaagtctaaggtgagcatgtttatatgtgattcttgagtcagacttctgaggtaccagggctgtcttggaaactccatcctctccggaagtatgggtgtgcaccaccacacccagttgctaagctcattctgggggttcatgttgtaaatggcctacttctgtcacgtttgacctttggatttctaaacatattaaaattcctctgtcatctaagatttttaagtctcttctggttccacattgaattctataaagtggagactcacactgtccaatgtcattatctaaaaataacagcattttgttgtatggttatttttgtttgtttttctatgtattatatgtgtatgggtgttttgtttccatctgtgtctgtgcaccatggacatccagtacctgtgaaggccagagggctcagttcaattcccagcactcacatggcactcacaccatcacacagtcacacatgcaggcaacacacctattcacattaaaatttaaaaaaattcttcttttaaaaaatagattcatataaaaagctgagtgaagaaagggatgtttaaattttatggatgctgcaagggctttttgataaatgttctctgtgctactggccatcaccaaactcgtcctgctctctgggcatctgtggactacatggatataaagcagtttatgggtgtctaacaaaggcaaaggcaaatgtcatcaccgcgtagctggaggctgaagtgtggatggaaacagcaaacatgcagaaaatgtgttttgctgcagagagctgagaaattgtaaggtctgagaaaatgtctcaagtgcaatctcgaaggaacgtcaaggaaggtgaataacagttctataaaaagatgggagagtggatagatgagttggcccatggcaggcttgggcagcctttcccctgtgtagtttttggttacctgcattgtgtaaagtgttaaaagggtcatgagtgagagaggaaggaccttttcatgaatgtgcttagtgtattgctgtgtgctgtgtgccgtatgaatttcacttttaaacagagacccacgccccccccccccgtgtgtgtgtgtgtgtgtgtgtgtgtgtgtgtgtgtgtgtgtgtgtgattattcgtttatttttgaatacattttaagaggtcagcattgctgtgtggcctaggctggcgttaacctcctgggcccagggttttcctacctcagcttcttgaggaactgggactcccaagtgcatcccaccacaccagacagcattggtgtttaagaaacttgctgacaagaaaccagtgatacatttttttttaaggtagttttttattatgtcttgtctgtgggtattttgcctgcatgtatgtttgtgcatcatgtgtgtgcctggtgtcctcagaggctggaagaaagggttggaccccattagttgtgaaccaaggtgtgggcattggtaactaaacccaggtcctctgcacagcaacacgtgctcttaactgctgggccatctctctagcccccaggttttttttttttttttttttttttttttaacctcagaaattttacctcctgacatctgttgccttagatagctaacagagtctgaaagtgaattctcaaatcccaatggcattgacgggatagctgttttaggtgctgggccatggttgtatggattgtgtcgacagcagaataaggggttatttcaagcggtaatggtgaagtttaatctcctctttcaccctaaggttacactccacagtcagtgctaaagggcttcatggaggacctgcatttgattcctcagaactcgcaaacatttgtaatccctgttttaggggtggtgacaggcggtaacctggcctaaccagtcgtccccaggacctagttggggacctgtctgaaaacacgatgatggctcctgaggaacagcagtacttaaagttgacccatcctcacacacccatatgtgcgctgtccccaacagctttttaaaaaaggagctgtaatggaatttaggttttctgctactaagggccttagaataggaagctagtgcaaagctgtggccatgatttcttgatgccgtgtgttagctttgtttttgctggcaatcactcttgcatctgacagagggtgctgcgcccggccatgcccattccccacagtcatctattgcaaaggagacgatcgatcctcattgtcacttcttgggtgtcatggatgcagaagactttgagccttactcatattgtgagcacaaagactacttgagattagctggcagagaaaacttaattttgcaaacacgagagaactaccccatgcctacaaacagctcacactccttccgggagcaaacaggagtccgaactttggccagtagggcagatggatatcactggtggctacagcagagctggactgactgtgtggctttcttgggccagtcctttctaaagccctgttaaatatatcctcccggggacctgagtgcagattaaggaaggggtggtgccattggtgagcattgaggcctttagaagggtgacgtgcttgaactcaaggctgagtactcctggagctagtcacaattccacagatggaaagtggattctggctgttcttaaataacccttgatcctgtaagccagtctgtacatggtagtttagagggccccagaagttctcatctcattcactgagtgtaacctggtgagtcagcattgatggctttttatgtgggaagggggacctcttgtgagttgtgtctgaggtaccctctcacctactcacagcaggggtgcacattgaaagactgatcccaacaggtcagcagacagaccagcacagtgagcgtagcaccttccgctttcctaagccagtgccttcctggcactctggtgacagacacggtgtatgtttgccctttccactctggtggccactggcacagatgatggctggtgaccattttaactgtgggtagaaataacagaagaaataagtttttaattttacattaaaaattttcaaagctgcctatagctactcagcatgtcttgacactgaagataataaagtcacactgtgtgtgtgtgtgtgtgtgtgtgtgtgtgtgtgtgtgtgtgtataatctgaaacgggtgaattttggagttatattcaatgctgatttgagtaaaaaattacccaaatgccattgggcatttgaatgcttggtccctagctggtggtattcttggggaggcctaggagatgcagccttgctgagggaagtatgggactcgggcttcattctgcttgtaacccaggaagtgagctttcagctttctgtcccctccaccatgcctccactctgccatcatgaaatcctatccctctgggacaataagaccaaacaaactctttcttctctatgtttccctggtaatgctgcatcacagcaacagaagagacagtagcatgggcatgtgtgttgatggtcccctatactttcttgactgtaacttataccatatatacataaagtactgttctaacagtaattgtgctgtccagtttggggcacacattttgaaatatatgtatgttacacacactgttatacaattaaatgttgtggagcagctattgtcttcaagtgttggggcattgctaataacaaatagttgagggttttaacatgagtcaagctttagaataatattgtactttaagtgtcgccactataaacggcatgagtaggttatgttgcaccactgaggaacttcccagccctgacattgggcaccatttaagcaatgagcttccctgttgcagagttccatctgcatctggatccctccttgggagcttcctcgggaaatgcctttagctatctcagggttccttcctgtcccagtgcacactggacctgctgccagagcaaaccttaagagttgaggagaaatagaaaacaacacagtgggtgttattagcccagccggtttaaatgatgaggtgttaaccacattttgtataaataacagtttctctaaccctggaatcattatactgcatttttaatgcaatcagttcataaacatcaaagtgggaacaccaaatttgtatggggtcaggaccaactgggcttgtagtagagagacagctgagagctgtgtctgtgtgtgcgtgggtggccttgcagctgttgatcaggctactagacagttgcctctttgcctttgtagaaccagaccagtcttaggcaaagagcataccccgccatggaaaggacataaacagtgagctgacatcagctccaaaacagcaggtcggcagccagacacagcagttatccccaaatactgagtagcggaagcataacatctacacaataatatttgtctttgtacaatagcaccgggttctctgagtgtgtaaccaaggctcagatccaagagggtcactgtgttgttaccctccacaagggcagcggtgtgaggagcagccaggctgcacaggacactgtgaccctcgagtgcatgacctcacagtaagtgacataggtgcagagggcatttttcagagaggccagcattgtcagtagctactcagcagtctactgattctctttggaagtcccttttaggtcaagaccccacttacaggaaatgctgtgttttggaattgtttttaataggtcaaaaattaaataaaattcagtgatttgagggtcttatcattacctgaaaatctcatatttctcccatttagaatgatcactgaagacatgaaaacataccaatgatgtcacagaaaatgtcatggatagacttaagtgaaaatttaatgtcaaatgtattagagatagttaaatatagtgaggtcttttgtaagactgtttttttcagagtctgagaagacaaaccttacactgagaaatattaatatttgttgaagtaccaaagtcgttgtctctttgtgagaaaagggaaggaggagtggtctcagcaggttgaccagttaccccagggaaacattaaacaaggaagccttactcttccccttctcccttcctgcttccctgtgcctcttgatgaatgaaagctggtttttaagtggacacctgtgttcttggtttattgtagttcctctttaaggtgattgtgccttcagtaatttcacttgaacccatgaacaaccatgtttcaaaagtactaaatggaaaatttcagtaatagtccacgcgatgttctgagcagagtgagagaatgttcatgatcctgcctgagaataaattagccttttgtccactgtatctactgggtatatactaccaacccaggagtagtcatgttagccattgtatggcagtgcttgtgttcaaataaccctaaatggcaaatacaatagtggatgctggcagttcgtgcctaagggcagctgttaaaaaggcttccttaaaatgaaaagatgaagttgttgacttagtgacagggattgcaaaagtagtaaggtgaactacttttagattatacatttattttattgcagttatattttagtaattatttttaattatatgctgaatgtaattatacacaatagccctaggtatgtatataaaggaataaagatagtgtaaacagggctttcgggcatctttaaatgtcccctgtggagaatggatgtctgctatgttagctgctactaatatctcattaggttctagagaatagagcgtgttttaagttactggtcctaagtgtgacatgtgtatgtgagacagtgtgaaatactcacacaaggtaacaagagatgttcctcccggcaatagcagctttgagttctctcacccccagggcgtgttttggtcattgaggtcagtttattgcacagtgtgttgctgcagaagccattacaggtcttgcctgagcatgtctgataattcagagtttatactttgattatctgggtgctgtctggcatccatcgtcttagtactgagatgcagtggattgccacagactgttcccttttgcttaacacagtggctggcggtttttttgttatgctttgtaaagaagatgttagcacataacagcttactcaagcataatttaggatgtccttttgttgttgatcaaggcctttttgtttattttgaagcagggtttcatggagctgaggctagcctcaacatgagtgtggtctcgcactcttgatcctgcctcctctgtctcctgagtgctgggatgacccatgtgccccagcacaacctttatcccctgctcagcatcaaacctagggtttcccactttctacacaatctttctaccaattgagccacatctcttgcaccaaggatgtttttaaaaatgttatactttaaaacctgtaatttttacttaatgttcagtaatagaaaaacatccttgaattgaaatgttaagtgtgctagtttttaaaagggatttatactagacaagtgatatgatctctatcaggtggtgtagagctgtgagggagttgtaaaataccactactgtcccccaggtggcagagtttctgctgtcattgagtcctctgatggaattgctctcccctgcaaattgagtagttgctttctacatgagagtaactggcatggattaaattgttacagctggtcagatagccagactgaccctagaacagtgtgttcactaatgaccccactcaacatgaaatcccaacttggatttctccaaggagcaagtaaacctagtcatctgtaaggtcctttccgagccactgaggcttgggtcaccgtgacatactgtgtgtgatttctttctttagttgatgaatagcttgccatttttttaggaactgtaaagatgctgctgtttttaaaaagacatacagaccagactcagaaaccataaatggtagaaatattgatcacaaaacattttcagatacaactctttcaggtgcatgacattaactttccaggagttcttggtttgcgggagcaaccgcttttattaaacagaagagatcagcatgaaaagatagtattatgtgagtcatggtacttaaatatttttaagttatagtttataattgagcatggagggcagagaacaacttatgggagccggtgctttccttgcactgtgtgggtcccggggattgaacgccgctggctaggtttgagtcaacccaccagtcccacttctgtgcttatttcccctcctggtgtcctggtgttacacgggaggggtagcactgctttctcacttcggaagttgtcattggttttctacagcgactttatgaatacactgaaggcatgcaatgcctgttagtcccatctttcttatgctatcagtagctcctctgtagtgcatgtggagtcagtgtgtgaaggtcccgggacaacttgaacaacttgtagagtgttcttgccacctttgcatgagttccagggattaaactcaggccaccagcttctagagccagagctgttatccatggaagcattttgctagcctcctcctctttattaattacccattttcttcctacatagagataggcttccctgcagcccacacttcttagagacttttgtgatgttgtagttttatatgaactgctaaaattgtagagcaggtatttttgaaatggaacagtgaaatgatgttgggatccactgcttatgcaaggacagggcctggggacatgtcacatggtccctgtaactggaaaaggtgaaagctggaaccattcctccagatgaatgtttgagagtggcttcatcctcaccggacgtttaggacagccttgtgacaccctgcctccttgtgctgggtgcatttatgaattgcatcctcttcccagagttcctggatttgtgtgagaaatatgtggtaaatttcattactaggagctttcagtaagtctataagttctggaactttcttttctgagagttgaagtggtcaccagagttgtggtcaagactctgaaagccatctatctagttgtgctttcaaaaatacttattaacatctattttacttcttaaaacacttatttaccagtttttccatcagtcataaaagccacaaagagattttctttttattcagttgctgctgtcttttttgtgtgtctgtttttaaattgcatcgtgaagcagtagaaagacagagccgcttcaagtatagtttggtgactttgctaggagaattgtgcatacgtgggatttcacacagcctgctgccccctgaggtgagcaatgacaaatccatctacaacttaggcatcttacaaatattcccatctgggctctgtggagatggctcagtcagtgaagtccttgccttgcaagcaggaggacctaagtttgatcccccaagtccacattagaaacatatagtcctttatgacagatgtgtttataatctcagcattggggatgtggaggcagaggatccctggggctcactgccagtcagcctaatctactcagggaattcaaggccagttacataccctgtttcaaaatagtgtggatagggcctaaagaatgaccagaggttgtcttctaacctctacacacaagcacccagtatgcaaataaacatgtctgcattcatgtgggcacatacatacacacacaacactagaagacgcctacttacgttccgtcagactcacttatgagaaccctaactctattctgtcacatgtcttctcttctttcattttaatttttatttggctcaaatactttgctcatcttccctagtgccctggctctgtgtggggtctctatgggccacacaggtggtttataatagaagcatgagcagggagttctgctgctggcccctgcctctcagcattgccgttgtgtgcttatgccacttgttaaattctgtcttaatggatggatttcaccatagtcaagaaattagaggcattgctaaacgttagagaaacctggagagggatggcagcgcaagctaccgggcacccgcactcttgatggaactatgtccaagccaatgggagacatgactggcctgggccatgagcattgtcagcacatactgatgagttctgtaaggttgcctgggctctgcctttccttgtttttaactgcttaaacttaaccatccacacttaactatccacccccctaccctgcctcaaccacaggtctctttaaggccttctcttcatgttccctgcccttgtctcatcacttactgagatcagactatagatgccaaatgaaatagtaataggttattattgttctctctctctctcctctgtctctctctctctctctctgtgtgtgtgtgtgtgtgtgtgtttgtttgtggtacgtgtttctgtgtggtgtggtgtgtgtgtgtgtgtgtgtgtgtgtgtgtgtgtgtgcgcgcgtgtgtgtttgtgtgtgtatgtgtgtgaatatgtgtgtttgtggtacgtgtttctgtggggtgtgtgtgtgtatgtgtgtgtgtgtttgtgtgtgtgtgtctgtgtgtctgtgtgtagtccagaggctgttgtcagatgtctttaactgtcaccccccacacccccaacttatttttttcagctaggatctctcatttgaacatgaagctgggggggtgcagtcagctggccatctgtcttgtctcccagcactggggctgcatctagctcttaagttgaacttgtttattaaaatgtacactgatcctgaggggggcgactaatatggaccaagccttgtttttaaattgtggaatcaaagattaactcacagatcagtgaaatggctccaagggtaaaggcatggtgacctgagttccattcccagaacctacccatatggtagaaggaagacaacaagagtgggagagctctcctttggcctccacgggtgtgccgtggcatgcctacacacacaaataaatgactgtgaagatagaagttacaagtaagaatggaaaacaatcattcttgtactcgttgtcataatttgatgattgaaaaaatgtttttcagcttcatatatttccccacttcctgttgttgttttctaatgctagaaggcattgagaaaactttcagaattgttataaataagttaatttttcttggtgagaggaaggagatccaggtcaggctgtttctgtgacactgaggacggactccatgagcagtttaggcattccacatcacccaagtgaataacagacccatcaatgaatagtgaaggctgctgttggaacagctgcttcctcacccctcaacctctggcctagaaaccaaacctctcacttagggtgttaagagacctttctgttgaatgactgactgaactttgatagcaagttcctattgcatttcctcaaaagtgtgtgtttagctgttctttctacaattatggagggccaaatttctgtaagctttaaaacaagacacgtgtgaccttgaagcagatccatatggatccttccctgaacccttttttgtttctacttgatgaagaagacatagacatgcttgacagtgacccctgactgcaatggagaaaggctgagagagcggcggctgaagttcagggagcagactcgaggccccacttgatgtaaacgctttctatgcctggtataatgattcctcactataatcttttgcgtatattcccattcccacgggccatgacgtgaacagagcctctgaataattttgttaggttcatgagccacagggacaggaatttgaactcctggatggtcctcctgggcactggggtactcgagggtgctctttcaccagacagcccagggagccccgaggccacgccagtagtaatagatgcggtggctttgtttcctgactatgggccacaaaggcctgagagctgctgaagatggacggatgggatgcaccagcacagcttttgagagctgctctcccgggctccctcttctgctgacatggggactgtgcttgcccatcccagaatgtgtttgtcacctcctgggctttggggaaactaaaggagcctcttaggaagaggtcccttctcaggcctaagggatatagagctgcacgtgctcaaataactgccttgggcaagagtgtgggtattgataatataggggtgcgtgtctgcatgactggagtacatgttaacacggggctattgctgctctgcacatatccttatctgcacccacctatcctaagagtcacccatgcccgttccccaggtcagtctcagcacccggtgagatgctcactggcttcaggggaagccctccctaggtgttcagtagattaccgtggcagaaccccccctgtattccaaagtggcactggccctcccagcagctctagctatggctctgtgtcttctcttcgctgatgaaacaaactatcagccaacagtagctctgggtgggttcctctccagcttacaggatcatagacagctgtctaaccctgccaggagagctgtctccatgtgaagctgatggtgaagtctgccgatgacagaggtttctatatagttttcagagtcatttaggcatgtgttggaacaattcgttcattccagggttgtacaggtccagaggagtagagggattttgtgttcaaggtgggtggggacgggatcaaagacttaggaagttttctgcagaattcttagaacacagactgtggcggtgggaatcttggttctgtaagagggcagtagactgttgtcaatcacccacactgacttgacctcggaatccctggtggtcagatgttctgggactggggtctctcagaattgcattagtgagagagaactcaggcagcgggcagtccctgccaagtccagacccatcacttcctgttctctgcaaccacgggcttcacttcctatggcctctgtctccttggctgtgaaatggaaacaatgctcttcattgctgtgtgtaatgtatgccagctaccatcactatttgcccatctcgctctaccaatagtacaggtccctcccacacgtctaccgcatgcatccctacaggcttggttcgttttcaactaggaagtgactgaaccagtaaatgatacagagatgtcgactttgaggggaacacagagtttccagtttaaattatgtgtctagtcagtgtgggcacagagtcactgctaaaattgaaatgttgactttgactaaaggtgaagaggcgaagtggcaagaatgactctggtgtccatcggggtcggtgtgtagaagatgtcagcctgtgagtactgtggaacagtagacatccaacatctaaaatccaggtttcctgtgtgtttgctgcggatagaatgaaggggggggggagataatacctgtctaggaagaaaggaccgagccatgcgagaagcgggttcacaggaggaaggcagtgattcctttattcagagcagtaaaacagagcatctttgggggggagaggtgcatctgtttccgctagctagtttgctagttcacaaacagaaggctaggttgtaaacagaccaataaaaatcagggagcctgcgaatgaatgagccccaccgtgtaaaaaggagatgcttagctgcctgtccctcggagatcacagactgtgactgctgcggatctctcttgccagtcgccctcctcctcgggccgtccccctttccacaccccctcaacggtcgagagctcgtggtcttagtaacagaggacttctgactgtaatcctagcgcgtcactttgttgaaggcaaacacgtggtttggggagcacttataaatctctgctccgggcaggatcgtgatgttatctgctggcagcagaaggtttgctcggagcggagctgctggagctgccggccagagagccagggcgtgagagtgagagaacaagcagagagctgagccccggggcaggggacagggatgaggagcagaagcgttagggtttaaggagccgttctggagctacccggctgcagagaggagtcggtctcagcagaggtctattttagggtcgcaaggtacttcttaccctaaccgagaaagtgcaaacttgctggaagccaggagaggctggggaagggtgcgagtctccgtggcgccccgcggccgacgcgcccaggaggcggtgttgttccacagggggtgaagaaggtggccggtttctgtcgccccgtggccgcctggagccagaggagcaggatctgcaggacggagctggaggctagccccctttgcaggcatcagcggcggctgcaacgtggagcgacccggccgggtgtaggccacagcgcggccacaggagcaggatcgtcgctgcctgctccgacctcggaggaactccggggcggacagtaccctcaccgagtccccgagtgagctgcgccggggcgcatctgcctccccgcggctcgccaggctcgccctcggcgcgcgcacacgcacgcgcgcacacatccacacgcacactcatccacacacgtgtggaaggcagggccgagccgctcggtctttgaacatctcagttagagcccggcgcagccccggccgcggctccgctctccccgcggccctgagcacctcctcccagccccaggaccttctcgtctcttcccttttggccgaaggatccgagttcagatccgccactccgcacccgagcctgacacactgaactccatttctttcttttaagtttatttctacttcagagccactcaccccctcccttccaggggaaaaaacaaacctttcttactccctaaagtgagagcccccacccccacccttgagcatcgcatagtaatatctccacgttgggaacgcgttgcattttctttttttaaaggaatcccagccagggacgtttttctattgggcattgactttcgattgctttgcaaaagtttcgcattaaaaaagaaaaacaaaaaacaaaaaaaacaaactttacctgacccgctttgagaattactgttttctttatatatatattttttcttactttaaacaacaacaccagcgacgattccaccttttagaaacatgcactactgtgtgctgagaacctttttgctcctgcatctggtcccggtggcgctcagcctgtctacctgcagcaccctcgacatggaccagtttatgcgcaagaggatcgaagccatccgcgggcagatcctgagtaagctgaagctcaccagccccccggaagactaccctgagccggacgaggtccccccggaggtgatttccatatacaacagtaccagggacttactgcaggaaaaggcaagccggagggcagctgcctgcgagcgagagcggagcgatgaagagtactacgctaaggaggtttataaaatcgacatgccgtctcacttcccctccgaaagtaagtacagtttccgtggttttcgccttttccatccccgagtgtgaggttggcccggagctccccagaaccacagcagccataggcgtccgccttttcttctccaggtccccaggtccccatcggcccctttccattctgtccctcgctccttccacgtcttttccagtcgcgggatggagatccgcagttttacaaatcttcaccttctgttttaattttttttctctataattcccttccccaaacgccccagtcctttttaaagacctttgatttttctccctcttccctggtccaccaactagggagtcaggtcccttctgtcaaaaagaaagtgcttcccggatgactttaggctaggggacagtggtagacctgttttctttgctgggttggcgtggggtgggggtaggggtgtcctccaaccggtgcgcaaagagttaaaaaagaagtgcctccgaactagccttcccaaaggcacccctttcagtgctgacctatttgggggctccccaagctttcgctattgtttctcactgccctaagaatgtcagcatcaccagcaccaagcgggattgcgggcgctcgtgcggggtgttgggggggggggggacgacgactgaaaaccccttaaatcctcgatctactatggctctctctgggtgttttcacaccccctcccctcgcaaaaccgagtagccaagtccttttctgacctcacgtggagagtagaaagggtaaatacggttctaactgggctgagtcgctttcacttcccgttccgtttctctagctggcccttactaggctgagagcaggacgtttttcttgggggattctccgatatctttttcaaccttgaactctgctcctgcactttcttaagcagcggagacacttgagcattccgagatcgagtttaggaaagacagctgattttttttttttttttaaatatcttcaccctgtttccctgcgagcattgtcctcaaaacagctggcatacagtagcagtgatttattgtggtgctctttggggggaagggaagcagtgctgttgggagaagagaagcggggagaaagagagattgtgattgcagcagcaagagcactgagtgattacctgagagggttaaacaccaggaagaaacactaaaagaaaaataaaaacttcagcatccctgtgttccaagtccccgtcgtaaacttttcattggctgatcctttctctcctccccttttcatgcctatatcctcgatggctgcctttgtgagtgaagtcggtgtcttgcctaaatagataatgcagccatcttggtaattttatcccagaagttagaattgcagggttgtgcttttctcttctaatatttatttttagtttgacgagccatcgctattcgacttgccttgtcttgtacttggtgtcctcagagtgcctacccatgtgtctacccgccctctttctggtcacttttcttaccctgtagattttcttgctgtttcatagagttacagaggcagggaaccctgcccagcagggtaattttattattataattatggctcttaccaccacagtggtgacacttacaccaccctgtttttcagcccctgggaaataaggctttctatctggggcggagccacagcatggctagggaagagagtgcattctaattagtccagaaccattgaggctgagcaaagggttgcgtcagttagctttctcctgcatgtgtgtgttgattccactaatattcgggctgacagacaggtatgtcatatggggtcagtaactcctcctttggtgtttacatgcaaaggctcaaattagctgctaggatgtttgcaaagaaagaagacacagtctcacatcgcctgcgtgtggagagaggtagcacttcagtctgatggataaaggtgagcagacaacccaggaccatggtcatgagcaaagaagaaacattcccaggttctcaggaggatttgacagtgccgtctaagattaacgcgtggattctcatctctagtccatcactgaacctccaaatacatgaaagcctaaaaaccacacacatgtgcatgtgcacacacacacacactatacacacaaatgccatcgtattttcacatgagaaacagagatttgagacactgtgtgtccagtgtagactcttaggggtagaatgtcatattaatagtagattcaacacaactgcacagggactgtggataattttatagaaagtaggttaactgattttccaggactagaaagtcctggaatatagtgagagcttccaaaaaaaaaaaaaaaaaaggaagaagaaaagaaagaaaatcattccattgtatttttaaagcaaagaaaactggaaatgtagctatggctgccttatatgccagcttttcccctttggcgccttcggctgtcactgtggtgccccaaaggagggtgtgtacctgttatgtcttgcagtgactctgaagaggggccataagtgcatggaggaaggcatgggaaagatcaccgcttcttttttcttttcttttttccatccaccaacttattagtgttcagggagtgacttcaactcaagtattacaaatacgccctaattagacttggtgactatatatcactagagatggttgatagcccttggtgggacattttataaagttcaaactcattatttttagcaatgtggagatttaaaagtgaaaatataagagatattgtatatgccctcaggcatactttgtcttaaatattatccttggccaagtgtgctatataaataaagtagatattaatagaactggccaggtgccaagctcctagaatgaattttagccaagaatgtatttatgggggtataaataatactatgtcaacatttaaagaagagatctgattagttttgaatttcttcatattgatcttttcacatactgttagtttaagactcgaagtggatttgggctgtagtttactgattgctggcccagcagaaattagtggatggtgagcactttgacctttgaagttcaaggtgcagctactcaaaaggcgctgtgcaaggctttagaaattctggaaatttgactctgttgcatttaagaagaatctaaattgatactcaaatctgtagagacatggtggggacaaggaagtagtttttccttttgtttattttttgtttgttttaagtctgaggaatttgtatttcaaggaagcagaacccaccattgggctgtatcccaacctctgtttgttaaggtagggcctcatgatatagctcaagctggctttaaaacttgtcatatagtctaggtcatcctccaactcaaaaccctctggcctcgccttccctagtgctgggacttgagaaattcaccacatgcttggctctcctctgtgctttcttcacagcaaagcaggcacacgttatgggtctaactctggcagggttgtatcccgccctttcctctcctgcttctgttgtgacaactgacaatgtctgaaaatagttttccttgtcctggggtggggtgttgctgcttctggtcttcattagatggaatccagggatatttctagcctatcacaatgaagaaggcagtctatccaacttctccatataccggagaattatccagactcaaatttcaatggtgcccatggtgggaagccacagttccctggcgtttagcttgggctgctgaattctgctcctcatactattttaaaagtaatagcaacaataaagtatctttatgatgaaaagataatagaatgaaatcataagatagagaataattggaatagaatatggattaggctattgtgtgtggcatatactttatgactgtgatattgacgctcctatgttagagacagtcaagtttcccattcattcaccttctgtggccgggttggtccctcatttgctaggaatacttgtcaatatcagtaagatgccagtcaacaaatagaaaaaataatagaggaatcatattggattttccatttgtgttaatgaagagcggaatctgtagccggggcaagtgaaggaagtagcgagccaacggtgtcttattctgtctcctagaattaggtggcctgaagtatgtatggcctggaaaaaatcacagctaggtttcctttgtaattctttcacatgaaggctaaacatttaatgctaagcagttctccttttctggtacccctgtaattttccaagtgaaattgtgggctgtagaatgaataccaatgacatgatggttttggggaatgtgacttagtattcaattcatgaatctgtctttctatgtacagattgctggtctattgggccagctgcccaatggaggagaatattagcagaacacagaggatttatttttatattctctcatgaaaggttgtctgtgtatgtttatatatgaatatgtgtcagagaggggagggggggttggagagaaagactggcttggacctcttgacttccataatgactgttattaatgcacaacaggccagactttaattccctctttttattgcattgtggccagcactacctctaatgcctaactgtggttacgcttgagttcctctgcatgcccctccttcaagatttcctgcatttttactctgcagactaggtgagaggaacctcaaattaaaacatggtttatagctgaaacaggaaggtagtttttgttgccaagtgaggctgcccctctcctgagtagacctccatgttttaaaggctggggttccccaagattaaagagcaggtgtggtccacttaactgcacctctgggtctccacagcgcctcccgtggtcaaggcgaggaggcgcaggttttgaaagttgtcttcttggtggaaagatgctgatgtaacgtcctcaagcaccttccgtgtaaagatatgaaaggatgacaaatcgtttttcctagaggaagtggagatgtgaaaaaaaagggctaatgactcactactgaccccacgtcagatctgggttagaatcgaggaggtcagtgactccggggcctttgcccggagattacaacacacttgaggctgaagtttagaaggttcgggaaggcagggtggaggaacctgggagaaggcccaggtcgttccccatagctcctgccatctccttcataggttcccaagcgaggtgagcagcaagcaggtgcctgcctggagcagccctttctgctgtcttctcgcatttccggtctgtccttcagcctcagcaaggaatccactttgcagattcccagcagcctgacgaaatgtggcttgggctgagataaacagatgtttctgttgtcatttttaaaagcatctggtgtgctcgtgttccgctctttaatatattttaaacagagatagtatttaacccaggaattcattgttctctaggtattttaatttacatttaataacatgtcagggattctgggatgggcttgtttagaccgcaaggtttacttccaccttttgtttagaagaaatgtgtgtcttgctctaacctccagctgccttgggtggtgggtgtctcttttctaacctctggaagccagaagagggttgtctgtactctctcaacaccatgcttccagtgtggggctggatggccttgaccatcaaaccctccttgactcctggcttccaatccaattgccccttgcccctcaagatggtggttatccctctgtagggtgttcaaaccgccgttgtgctctgtctagcaccttgcagtgtttgtgagatatggcagaccttcacatttctacactgagccgcctgcttgagcagattgcacaagtattatgtgtgaagaagccccaggcagcttctggcacttagtaggcccttgcatgtcgttcattattcactgacttgcaaatgccattgacattagatgtacccctgtttcacacaccacttgaaaggggcaattagtccagttattctagtgctccactggttatgagatagcatgggttttagcggtatttaaatgtgacgcccgggtaccactgctaatgtcttgggatgtcttggcatccccacatcattctgtagaagcttcacccagtgggtccagttcccttgttccctctgcttgtttctcaggtggcctctaggcctcagctctcttaagaagttaggactctagaccctttaaggtctagaaagctctgctcttcttctgcaccccaagatctcgaccccgctgtttatttgttatttctgtctcctttcactgttttgctcagttggttttgtagctgccctgattcctctctgtcttagcacattgtctttgctcggtaagtgtccagtgagtgagcattgcctcttgagcaagatgacctgcaccaggaaacctggagatgaaggctgctccccttaaacatcaggggagaaaggactcagtgtctctggctgaggcagcacaggttcctttcctggttctgtacttttagggaattataatgatgtggacaagaagaaagtaaaccttcactgggcccttctttgtgccagacttggcttgaaatatttacatgggcctcatttcatcttcataagtcaccctgtgaagttggcctagcatttccactttgacatctgaggatacagatgtcagggtatccacaataggttccaaaaatgaagggtttgctctctgatgataatagtggccctaatacacagacccaggaaacagacactactacttttcttgtttgcttggtaaatatgggggtcttaatatgcaggccagaccttaggatatgcaattcaggctggccttgaactctttctcttgctgctttagctcctaggtgctagaattgcaggcatcactggtcagtctgcggagaattgcatttgcaagttcagaatattatcccagaaaagcaaatggatctctgcagattgcacagaactgggggcttgtcccccttcaaaatgttcaacttttatctgtgctcttggttgatagaaaaattatgatttatcaggtccttgcttttgacctgtattgcaacccctcccaaacattttacgatgctttcgcagaattcattgatttgggaaggcagaatgagcctgagctttagagctagccagatccaataagtagaagcaagagagtagatggaaggagattgctccaaagagaagggaagtggaggctggaaaaacggggtcccatcttgactgataacatggccttctgatattggctttcagaactgtgacattgacatcaaagtgtgcctttgctgttactggccttgtagcatgagttcctgtttcttcacctgcctggacctcagtttctcagtgtgtaatcatgaagaaaataacagctaagctagcgttgtgaatcatgggtaccgcacatgtgatgagaacacctaccacaactgcttctggcccttagggccaggttttacctcctcacagtggtgatctgtcccaactcccctagtgagaaccttgagaagaaggaagcaagacatgtggagagagcgctaaccaggtgagcaggtgaggcagccatggttaaacatggcagacacactttgaccagagactacctctgtcctaaccctgaattatcacatatgaaggctacagccagtgaaggagcttagagcctggaagtctcaaggaggaagctaggttcgagggctggaagggacttctcaggagttaccccaaatgatctgaggaggacaaacaaacccaaacaaggggcacccactctgagcactctggtcttggttaagagtagcctgtatgatgtttcctctgtgaatttgaaccctggatttcttagggcagcccagggacaccacttcgatgttgccagaaaactgctcttcatgaggcaattgactgggtttaggtcttttggaaagaggggaagcatcacagagctgggcaagccctgtcctgtggactgccaccttctcttcattctctcagacagcattaggattcgttaggcctgataagttagaaatgtttggctaggatttttcctcagccacaatgacttgagaaaccaaaggcagatggaaaatcctctgtggatgttgtgaagcccaaaccgtctgaaaatagtttgaatgcatttccaagcctcggcaggcagctgttttccttcacactagccggctccatgcaactctgttcccagggagagtgtctctgctgcctcaggccttcctggctctttcctcactggtaattaagaggcaggttgttcctgaagaggagactccacagatctgaaggcacagtcatggagtaactatgtgagaacttctctctcgtgatattagttgcaggaaatgcaacaggatcttaccagtctcactaaagaaaaagaaaaatgccatgacttggatcctggctctgttcacgtgcctttccctgtctcgcccacagcacactgacaaacaccacttctgtcccaacaagccagttcacagatcaccatccattcataacctcaggctgccatagaacactccttccttcctgcttgtgaacaagaacgatccaattggcccaagaaacaggactggtgagctctcccgtcactccacctgagagcaacagcgtcaaaatcacctggtagtttttcttggtggatttttaacagcacagggatatttattgttgccaaaacgtaagtgggaatattctgagaaatgcaatttaattctcaagctttggactgttttcattgttggtaatttcagtgctgcttagaccaaatttatcaccgattattctgtctgcaccagatgtggcaggactttgtcatttttccatttggggaatttttttttttttaagagggccactcatagttcatccactaatcaatctcattttcacttctgctttgacgtcttcatggtcacactgaaatcatttctacttgatttataacgaagttctgcaatggagcagctagctcagaaagtcctgaaaagtgtagacggtgtactctgaccctagggcagatgaagaaaagagcagtcccagataaaggccatttctctgcagaggaagaggctttattgaggaaactgtcccctgggatgtctctctgttagtgtatcttcccacatccaagtctatcccttggcatttgccgctctggaagttgagaataggcatggcggaaggaatccttccgagtttctccctggtctggaagcggtgggacagcaccagatctaaaccgtagacttcactccaggcactggtacagtaaggaccacatgtagagatgtctgtgaaaccctgggttctcctgtctttcaccatcctgtttatatccgaggcatcttgaaactcgaaaacaaacaaatgaacaacaacaaccgcaacaaaccttgctgatttgacagtgtacatcccctcacctcttcatcaggttgctaggttgttgaatgtgttagctgaagtcactaggcaggcctcagggaactgtgccctgacatgccacttttcttctgtttctgtagatgggggtggtgggcactactctgtcttagagagggacatagtccaagagaatcccactctcagaaaatgtcaccgtcagtcaggaaatagtgggtgtacaaccagctctcatttcatgtgtgttcatgctacagaaggaagaccatgagtcaaactccagccttctctttccctgtaatagtcgtaggaacattctgagaacagttgaaagtccttgtagtttagtgtggtgaggaaaaggtagcacccagttgtgcaattattcttactgaaagagagatactgtgtggggaccgtgtggggatttttcaggagctaatttgacaggaagtttattgagacttttgaaaagatatatttattttatgtgtatgagcatgcctgcatgtacatctgtgtaccatgtgcagttggagggcagttttgagcctggaaactgaacccggatcctgagcaacagtagccagtgctcttagctatcaagccatctcttcagccctgattgagagttttaggtgccattcaatgacactcaacaagtgctacccagtattcccaggtggtttgtcctctgggagctcttgacctctttgcccagaaccaggtttcaagaaccctttgtataactgtgagtgataaccaggagagagaagaaggcttgcattcttcacctgcaccagaggggactcttgggcacagtcaaatttgaaaactactattttgattctttcccgctcagaatctacaagggcctttggctaaacctcagggtccctcaagattatgcaaccagctagattaaagaaaaagtatctctttgcaagtagtggattcattacactgctttctgtcataccagttctaggctaaaacagccaccagagctttcatcattggcatcatagtctttagattctttgtaaagtatccatgcaaaacactccatcttatagtctatacatacagttcccagtcctctttctcactgtgaggatacaggttcttctggccagtctcatctcttaagacatgactctgtcgggggttttagtcgtctttctagtctcacaaagtgcacagaccaccagagcttcagtcacctgaaagaaccaaaaatgtgcatccgtatcattgcttatacagtcatgtgtgaatgttggttgcttaaacagggagggcttctttctgtggccccagaagtcactattgtcctcttcatagccccactgtggccctgcttaaaaacaaacaaacaaaaggcaacaggacagaatgaaaagggaaaagaaggatattaatatttcaacttcattgtggaatagaagcaaaccaaaggtgcatacttaaggattcaagggcagcacttccctgcctcggctctcacctgtgtccccgaggtcgaggtagctttgggcagtgtcagtcattccagttcaatgggcagaatggtatctcttcactatcaaggcacacgctggcctgaagaaggtgctgtttcccagggaaaggacttaggttccccccaagaaatgcatagggccattccacagaagagccagtgaggctgagcaagcagttgcctctgcatctctgcccatctctgattatatgccgtaagattcttatttaggataactttcagcgtgactttgtacaggtcagatatgagcaagaaaacttgctaatcttgtgacaaactgtttacactcagggtgagggataccctctccctatcagactgtggagaaactctaaaagtaaacagcacagttgcttcctgggttggggggggcatatgggcgcagatgtcagctggaagcagcatatgttagctacatgacaacagcgtgtgtgggtgaaagggtcatcactagacttcacctttcccgcccgcactggccactcggagccccattccagaaccaaagagtgctctggcttggaagtcagatccacgtgtgggtgaacatgtgtcactggggacttgttagtggggtgactgttggagatggtcagttacagagtgtgggaagggctgtccctgtcttatttaaagtgacgtgtgtggaggggtccatgaggtctttgtcttgttaaaaaaaggttctagcccgttctgaagggtgttggttacctgtagaagatacacccattcaagcacgcaaacagaaagcacacagattctaggcccatgcaaagcactagaaaaggactgtcatcatgccagacctcgatgtaggtgaagcttctgtcaccacaccagccagataatggaaagcatcgcatggctcaattgccttttctctgccagtcttttaaatctggcatcgttttggggggcagggaggttacatgtttgtcttgcacatacagaaacatgggtaaggtcatgggaaatcaatggattttaatccctgtcttctcatgcaaagatcccattaatgagaagaaaggtgttgctttgagcactcaacagaggtttctcttccctttgacatgcttgcatacatgtgtggctttttggttttttttttttttttttttttcagtgtgttttctttctctgagaataaagcagcagcatttaaatctggttgctgttcttttaaacatagaaaccttagggtgtccaaatgaatagcccagctccaaggaagacacgtttaattctttcaaaacatgctgacttatgaaatagtaggcccatagctctaaatcagcaggcccttggaattctgacccaaatgggaaagggttttcatacgtgggtgaaaaatgaggacaggtggtttttaagaacaggccagccaaacaaaaactcaagctttgttcttaacaatagactcttttgtccaagggggtcaagacctttcttattcatctttagtataattcaaggtattacttttccccatttcagtatataaattgtaaattgttgttttattactagagcatgtcaaaaggacaattgcattgggcaacttgggctgctgggtatggcatagcaggagatcagggactagaaattggggtgtgagtaaaccctttgagtgtttaatgtcctgccctggttaatggatgcctgcgattttgaggggtggtgtgggggatggtaagactagccagcaagtatcttttctacttggaatcttagtgtagttctgggctgggcatgtcttcagtaaaatagctaatgactgctttttaaaactcctagctgtctgcccagttgttacaacaccctctggctcagtgggcagcttttgctccagacagtcccaggtgctctgtgggtaccttggtgagtatacttgtcccctttcttcctactttgacatggcgataccaagtcttttatgtctgtctccattgggaactggtcagaggggaggcaggattttgaaaaagagcttgtaggtgagcagtcatcagagtgcctgggattttctagtcgagtcagtttcatgagcagagctgatgactagcttggaagtaacacactgccccacgtgcaagaatgactaccaggtgtgcagggattacagagggctttaaagtattgatcctttgatccatgcagaagccatttctggagggccctcgggtgttaatgaaaggtcccttttgcagagtttttgtgttctgcattcctatttttgacacactgtagttgttcaattaatgattcttgtgctgaaccaaaataaaaggagatccccttcccccctttaaagtgatggaggggggctcctgggagagtcatgttggtgccatcatctctagccttattgttgacatgtctgggttgcatgagaaaatggattgtcacaggttaggccctcaaccagctggacctggagaccaagcacaagcccctcggctgcacatattagaatgggggtcaccaaagccacagatgtctgctactttctgatttggaacatcatctggttccattagcattgactgaatgcctaccactgttctgggggcgtgaatccacagaatataagatttgaacaagccaacactcaaggaattcaatggctgagttgtcccttcgccaaggacaggaagagaaaaacagatcaagttagttaggtctcttgaattatatgtgaaggtcctgcatagaaagggatgattttactaccctggccaaagcctaattctttggatatcctattttgtaccgtgccatgcctggcctcgcttcttaagagctatcatgacttagagtgactgaagctggggttttctagtacaaagcaaaacaatagccccagttctgttaagagtttatgtttatcatttgattttggtatagaaaggctcacagtggctgggggaaacaatgggaataaaaacagtaaaatattcgatctgtactggggtagttcttgtatgaagcaaattacagttggtttctaagttctgaatttctagttttattccactttcttaaccaaagagttaaaatgtgctgtttctttccgttcactgaccagtgttttggaagggaaaatggaaacaatgagtaaaggcaaacctctgtcaaacccctcacgttcctgttaacccaggtcacactacccatcctcaggatccgggttagtgatggaaggtgacagaaggctgaggggacagtctctctctctctctctctctctctctctctctctctctctctctctctctctctctctctcttcaggaaattgtggtttggagaagtgagttccttgtccttgtcccagaactgtctggtagtggagctgacactggaattcaggtgtgacctggctttgctccatgctccccacaggctccaaactcacttcttcctgcttttcctctccctcgggaagccagacccattgactctgtaactgttttacctatgaccttatgaatcttcccctccccttctgcccggcaagcaggctgagccctttcctggttcctggagtagtttttctccttagattctcctgtttcgttattttcagttagtagttgtctagagctttcctcttcctttagtgaagaagacatatgaaaccccagcactcctcggggaatctggtattgtcctgaacatctctgaggatgaaggtgcagatgagggcacagattttctaggttcctgtatagtgggaggctttccgacccctctaacctaattggtgaactccagaccaatgagagaccgtgtctcaaaagagcgtgtgtgtacacacacacacacacacacacacacacacacacacacacactcgggagggcagatttctgtgcagtggagctctgcttttttttttttttttttttttttttttttttttttttttgtcttagaaatagtagctgagtgagtgagtgctgggtgcaagcatccaggatgtgggtgaatctctcttcaagactgtgatttgaacatgcattcagtggagtcagcctgtgtcaagcagctcaagagcctccctgtcactttgtttgaactatccctccattccaaggagatgctgggaacagatagcagtagccagcagggcgcctcttcctctcttcaccaggtcaaaggagagctgctgacatgcaggtcacactgaccctgacctggttcgccctcaagcagtcctgttcttttctcctgttaaattcatcgtcccaataacacataaaggtgaggtggaccagcctcagtgtgaaagctggactctcacagacctgtccatcactcaggctgctcatagctgggcgtggctgtgtatgtggcccaacacaaacacacttaagactttatgagggctttttttgttttgttttgttttgtttctcaatttaaaaaatccaattgtgtgtttcccaagcgtgaactttgtagatgacagcttctttttgcaatgtcaaaaggttggaagcgcctgattctagaggcagctgggaacagaggttcatgtcaaccatccctgcgctagggggacagaagcaggagaatcatgagtttgaggctagcctgggctagactctgtgtaaaaggaggcaagaggaaaacaggaagagaagaagggaggaagggagagggaggagggagggagggagggagggaggggagggagggagggagggagggaggaagaactggaattccagacttaggttacagcagagatagctggtagtctctctgtgaatgcctagctgaacagtcacaacaatgaactcactgaaggatttagtgcaaggcttttagtggccccattaagatttaaagatgagggctggagagatggctagtgctttaagaacccttgctgctctttcagaggccccagttttggttcccagtaaccagctaggggctcacaaacatcaataactccaggtccaggggacctgatgcctcttctggcctccacgatactgagcacaaacatagtttggaaacctacatgtgagcaaaacacgcatgcacataaaatcaaataaaacttaaaaaacaaagccttgaagttggcattccaagcacagacgtgtttgtatacttgaaggcatcttacaaagcagcgtccttgggcttgtcccagaccagtggagtcaaaggcactgggtggggcacatctgggaggctgcacactctaaacagactgcaggtgctcctgacgtcactcaagtttgcagctgtgagagtcagtggacgctctgacgatgcaggtctgtttactcacagacacccgtgtggaaggcttcagatccagtggggcctctgtttgatcagctggtgctgcaagggaggtcccccaaatccaccgcacagtcagagttcttaccatgtgctttcccatttccaaagtacctacagacgttgaggtagatctgttactgacagatcatgcagaacccttgctccctgtctgccatatggaagggtctttgataagtgcacagggaagtgaattgggcacatgaggtgagcagcatcttgacatcggacaagggagtaatcccttcattcaggtgtcttcaactaggcaactgtgggctctgaaggagattcttttgtgttttgtatgtgtgagattgtgtacatgtgtgtacacaatgagtatgccgtgcctgaggagggcagaagagggtcctgaatcttgggactggaatcgcgacagttatgagcggctacgtggcagtgggaaccaagcatggctcctctgcaagagcagcaagcactcctaaccaccaagccatctcttcagcctccaaaggttgtcctcgaagctgatttttaatgtacatgagacaggtttaagacagaagttaatgtataattccctaggatagtgtttggtcaaaacactgacatccatgttatggcttgaatcccatcctgacacgttccatggggtttggatctagccaagaatggaatgtgaactccactgtccgaaccaagctaagcgtccaataacggaggttttcattctccagatgatattttccttcaagcaggtgggactgtgaccagctctcgggaagtgtagcagggactggacctgggcagcactgcgcctcccaggactctgatgtgcttttgaaccaccccgtgctctccattctctcctggactaggaacatttcagtacagttcttactgctattcttgggcatcgcactatttcgagaacttcccagttctgctctcatgacttacctcactactgaggtgtgagaagggtagctgagagggttaattttccttctcacaaggctttaaaatgggaagatctctacattaatgacaggtacaaatagaatcctaagataaatgtctcacacttgcagcaatcttggaaagacaaaagtaaagagaggacctcctcaagggatactaactcattcaacagtacttatccagtgtcttctcttggcaccaagtggttaccacagaagcaaacccttgccattggagattgtaattctggtgatgacagacaagtagtactaaggattcaaggagaaggcacagtctgataaatgctccagagaccatgggtagatcaggtttggggggacagagggaaggatgagtaacattctcacatggcctggcatggaagtgttgtttaagaaggtaatatttcagcagagactggaaggagatcagagtggctgcgcaggaggagcatcactgcacaggaagcagccagactgtccctggcatgtcctaggacgatcgatcagaaatatcctaggagatgggattaggaagataatgaggaaaagtccatgcaggatcctgttggccgtttaagagctatggctagtcctctgaagacagggtggtttcactaaaggttcactatggctgttcagtgcagaatggaacacagagtagcccaggcagaagcaggaagtccagcaagatctttataaagcacgagagtgagatcttccaagaacgctgcctcggaaatctatgccccagtggcactgcgtgcaggcgtgcatgtgccgtgaacatttggcacacagaagccgtctttattttgatgtatggtgcctggaggggcgtgcaggggccacaagtgtacattatacgctgagtgtagaagtcaggtctctcctttctactccgtgagatgggttattgcactcaggctgtcaggcccggctgtgagtgcctatacctattgagcgatcttgctgattgcttttgattagtaattctgggtaattagtaactcaccttcttccttctcgcaggaaaccattttggcagccctctgtgtgtgaaaaatatcccctgggtctcccatcctgcagtgacaaacacgacatggcagctgttggactatgctgtaatgtttagtaatagtcccctttgactcggtggccagggacacagagagctgaacacactcagaggtgaccatgccttagcctccaagaatggcagtccccctttccctgtgcaaagcagaaggttagtctctcaagtctttgggtctgtccagctgagccgagtataaaaaattgaaatggaagtgccttagtttaaatagtaaagtcagcgtttaagtcggaatgtgtaaagccatgcctcttaccactcaaaaagatttctgttgggctggattctgctttctgaatcttaaattttgaacagcaagacttcacactgggaggccaatttcatccctttatctgagtaagaagcatcaattgagtctgcagacagcatatgcgggaatatagcatggactctattctggtttcttttctattgctgtaacaagtaccatggccaaaaggaacttaggggaggaagggattcatttggcttccagatcacagtccattattgagggcaagaacccaaggcaggaactggaagcagtaacgtggaggaatgctgcttcccaggctccctcccaggcttgtgtttagctagtcttacacagtgcagaatcactatagatagtgccacttgcaatgggctgggccctcctatatcagtcaacaatcaaggcaatattttacagacattcctgtctgatctatgcgattcttcaactgagcttgtcctctcaagagactctaggctgtaccaagttaacaattacagctaactagtacaggcctcactttcagggaatctggaacttagtgaggaagacaggcagaccaaaccaaacaaccaaaacaaaagtcgacactgtgattggtttcaagtaaggcatcccagaggccaaataatcgcttaacgtggcttagggaggtaaaggacagattctagagggagatgatatttgcaacctgaaagatgacctttgagattatagtttggccacacagcagcagcaggaggtgttttctgttttctggaagcgggtttgtccttttgtgtgagcttgcctgactgccaccatcttgagttgtaaagcagctaggaaggcttcctatagtctacaagagagctctgaggctggagaatagaattgtagagttatatgaagtgcttatttttcaaagttggtacattgagaagatacatttagccaattgattgtaaacatgaatgtataggtgggctctggtagtttggactctgtgaaacatagtattattctataagctcaaggtccacctcaaaagctctgctgtcagtcccaatggcccacagcaattgttattctgttattctgagttgactatgctgtgttctgggggctctctccattcagtgaacctaacttaggcatggtgatagtccccacccatattctgcaagtcacaccaccaagcctgattttagaagggtcagaagagggcacaagggaagataaggatgcattaggagcagcctacagaagaggacagccaacagtttaaacaaataacaccgcctgtcacatggtaggtggaggagttgggaaagaaagatttccccagtgttgaagactctctctatatattatggatatgaactaagtctacaccatggcctagtctgtacagttctgaagagcttttaaggtggagactaacttactgttgagtgggttgctgttagaaagatggatgtacatgtcactttctttcattttcataatgacttgctcctctgattgagatgagtttttttttttttcttttttctttttttttttttggtagcagaggcatggctggaggtaccaggtctctgaggcatgtcttgctgtggtgcatgacatttatgtttgccagaaaaatgctgaaataggcctccctcccttgccttggggtccttcattgtcctcctggtcctcacactcctggaggtgtctgtggaggttttccacagcaaagattctggctagttacccttgtggattggcgtccttacatgcctagcagtttgctagagggaaccagatcttctgcggcttgtatgtcctatgaacttcatgataaattaagcctttgtatcacattaacctcttgattctagagtctagaactttggtctcctgatagagacacttaggtcttagagttggactcttacctgtgtacccagtgaacatactgggaatatcgctgcctggcaaggacctctgctggccctattgcagggccagctctctactgaaagggcccctgaatgtgcaaggtagcatagtgcttacaagttcatagataatcgccggcacagcctattcttagtagcaacagatgctaagctttcccagcctgctcccggggtcagtggtgggaaggggaagaaaaaaaattaaagcattgttttgcacatggctggacatctgtatttctgaattgccctgttgtgtgtatgatgcaactgctggagctgttttgctgaatgtgaactttgtccaccaactggagtctaaattggttttggatccttctgaactctaaatggtcagagcatatttttctaatattcagttggactgtgtctttgctcccaagtggagctgactccctctgtgctcacacagacagcaggggtcttttcatagcccacatggcttgttttcccaagcctggctgctgctttcttcatccattgtccctattcggggaaaccagtggacctgagaccacttcaaggatcattaactcctgtagtgttgtcagggagagggacatttgtttttcagaaactgaacaagacaaatcaccagcatggctgacctgcaggcatgcagtgactgaacttcacatgtaaaaatcactagtcctggcgtggtatcgtgagttcaggagttccaacctccgaggtgtatccaaaccaactgggaagcccaccctacctgtgctagcgacaatctggataagttctgactcagttgtctgtgcagggacccagcattttagctttcaaaaggcttcccaggtggtctgggaacctgtgttttggatggctacctatggcttctactaaaactgtggggttctgtccatattttatttttgaggaaatatttgcatgaagaaaaggcatctacagtgggagtgttgatgaatgggaagaacagattctgtctgtcctgatagcataagggcaggagagacagcatacataggctgttgaggccttgcaagaggacttgagtttgatctccagaacccatataaaaaagccaggccagtggtatgtgggtgtcatcctagctctggagatgggggtgggtgggagggaagcagatccctctactcaatgcaaccagcctagcctactagataatcttcaggtcagtgagagaatgtgtttgtgtcagatgaataacgtggacagcacataaggaatgacagccaggtttcctctagtctctgtatgtacatgcatacatggttacccataggtacatgagcacaaacacccatgtacacaccattacacacaataaacaaaaacatgaataatactgctaacagttagtggctgagtagttgggttctgggctaatgtctgtattggcccttatatgatcattattattctgttttatagacaggaagtaggggcttacagataccgtgtgtcattttcccatagtcacaaagatgacagatggcagagccagagcgtgaactttggctctctactccagagtcatcctattagctgctcttccttaagggataaactgcaaatttatgtgagattttatttgtaggaatgagatgacagaaagagaccccaagggctagggaccatctgtgcctcatgtacaaggaagtcattcttttccaacaaagagaacgatgatttttttcttttcttttttgttcctttcaatgcaatacttctctcctgtaagcttatgacatccatgggttccaatgttggcatcagagtgaagcaggggctcatacatgttctttgaagagcaaaaactatttttttttcctacacattagatgcaggatgagtgctctggtcaataattacagtaagtgatataaaatccttacaattgtctaaacaactgtgtttggtttgttttttcttcttgttttgttttcagcctggtgaatttcagcaattgctacttaattaaagcgcattgattttctaacacctgttaaaagattggggttctaccagcacccattaaacagcaggactcaaaaatttccatagtagtccagagcctgctgtctcccccacaggaaggaatgtggcagattggggcctccaataaatatttgttaaatgagacagggactgaattttgcaaatacgcaccgtaatagaaaaggtactgtgcgtcatgctgaggacttctagggaagagaggtctggttttagccacataatgctttttctccacacatggcaggctggccagctcctcactgcctacctggaggaatgctgtgtctaccaaatgtagcagtattaacaggcttaaaaaaaacttatcaccatgaacctctctctctctctctctctctctctctctctctctctctctctctctttctccaccatgatgaaggaatactgacttcctcttccctccatacagtatattcctttctcttatgaattttgttagttgctgttttatacatgtatagaatgtgtgctaactctctgctcccagagtctccctccccatctctctgcaagctcctcctcatccctactactccctttcctcgatcatacttttgattgtgttttataactcatttagtttaatcaaggccatccatgtgaccaatgagttggatctatctggtagagctcagtggagtaggcagctggacacactgagggccgacttcccagtctctctggattcatcagtagcaaatagctcggtagggggagttaggcctctttccccttctcatttcccctttgctccccctcccctccctctctgtgcctgatgataggcctgttttgggtgtagatccacccatggctggggcaactgcatgattgcaatggcagtgtcttacccaggattcttagctcctccctatctttcattccaccgtctcctgaagcgtccctggaccttagaggggatggtataaatgtcttgtttagagctgagatctcaacgatcacttggtcatttaatcctagccccgagtctctgtattcatcctacgcaatggacagaaaggcctctctgtttaagtctgagagtaaaatgtctataggtataagcatagatagtttgagggcagtttgactttgtgtcagagctcatttcagcaaaaggcaggatacaaacttaacgtgtaagaaatcagtaggctttctgtctaccaatgataaacacactgaggaggaaatgaggggaaacagacttacacacggcagccctccagcaaacctaactaaagaggtgaaggacctctactatgaaaactttaaaactcccaagaaagaaattaaggaagatgctcgaacatggaaagacccctccaccgtgcttatggattagttaatgttgtcaaatgaccatcccgccaaaagtggtttatagattgagtgcactctcaattaaaatccttatgtcattcttcaagaaaaaaaatacaataacaacaacaacaacagcaaacacatagtatttttcttattgtgagttagggcaagttcagcatccccagggcatagcaggagcggagaagtgacttcccagcccgcatgaaaagtgggaagctatgcttgggtggcttcccatccccagctgcagggatacctgggtgagaccccgttccctcagcgagttcaagttgctgtcacaagggctataaaggaacacttgggcctgggttctcatatctgtagccagacttcacgagtatttttagggctccctttgtctcaacctgatttctgcttgaaacttttaccacatgtagcctgtgtttaaatgacttttaaactactctctgggtattgggggaggggttgggtcacacacaactgcagcctttaagtgggttttttctttctttctttctttctttctgattttttttttaattgctaaatatccaacaagctgagcagaggaaactcaagcctaaccctggagggacccctggttagtcatctgtctagacagatgagagtctgcactgggactcttgtttcttttgctgttcaaaacagaaggtgggccttccctttcaactctgaagatattgacccccaacctgctgtcaataagccaagacagggattcacccacccaccctcagaccaacagtgaccttgcatgtgacaattgagttatgaatgagtagcaagaaaatgcaggctttgcatagaggagaccaggttccaatccagcaagcctgctaccctttcaggacctcactttgctttcctccaaaatgaggatttatcttttaaaacctcacttttttttaatgacttgtaaagaacaaaatgatctaacacacaaaaatgctccgtgcctcgtaagggctgaagaaattgcccttctttattcgtttcctggtcactgctgaagctctcaactttcttgctttttctattgtgggaattcaatggaaaaagtaggaggtacagcccatgtttttagcatcaagttgacaaaaagggagtggctgatgtcatttcaaagtatagaaaagctgaaagtgtctgtgagaggggaaggatgcagcagatattgtttatcaatatgaggtacctaaagacagtcaaattcatagattccaagagacatggtagatgctggggcctgggatggtggatggagagcgtctaagcatggagtctttagagtttcagttaagccggaagagtgagctcttgaacttctccatatgacagtgtggtggctagtcaacaaaaggaccatgtccaattaaaagtgtgccagatgaaaggatagcaaatgaggtgttcttctcatctcccaccttcctcagaaaaatgggccaaatccaattttctcaaagtagatggcccatgtttttaaagtgtgtgcgtgtgtgcatgcacacacacgatgcatggttcccatgcttacgctctgtggacatgtagagaggccacaggaggacactgggtgttttgttctctcacccactaccttattccctgaggtagcatctttcactgacccagaagcctagtcttctgtctccacgtccctgctgcactggggttacgggtctgcttagtcatacccagctcttcacgtgggtgccagggactgaactcaggtccagaagctagtaaataatagctctcatttcctgagccacctcctccctgcccgaaagtagacagcacactaactgtcttgctccttgagcctctcattttcagttctgtatggactggaagttttacctcatttatccagttcattttcactgtgtatgcactgtgctatgggaagaccacttgcttggaaggggaacatgggcctgaagcagaaaggcacagacgtcccaccttctgggctaaagcacaggtgtccccattcctgttgacaaggcccctctcggatgctttgcttctgatcatttgtgctgttgctatcatttgtgctatttttagactgtgggattgattattggatgtgatttcgtgtggtgtctgagagcacagtgaagcccaaaggggtgcaaggcccaccactggtctaagtgcacaggtcgactagggatgtgtttgacccccacagccatcaggggtgagcctcttcttagctactatgtgtctttggattcatctgtctgacacttggtgaagccttacttctttgaggtgttcatctttctgcagccagggaacttgaacttggctttatgcagggtctcaattgcatgttccttattctgcagcatgaggctgtggatggacaggatgacctggccagtgtgaatcctgtgaaccctggggcttccataaggcaccctgcataccttacatgcctgctactgagatcagagacatcaatatccaccagaaaaatgtctccaaggtcccttagagcaatccgtacaggcaataggctgcatacattcctgaggaggttgctgttagtgtctgctgcacactaggcccctgtgagaaaagaaacttgattgattgacttaaccaactgcagaatttttgttctttctgatatcacagtctcattatgcctgccttcaagtagctcatacatgtcctttttgtggagatagactagtgaaagaattattgtatacaatgcagatatgtttttcttttttaaagaataagtggatttgtagacacagcacagtgggaacatatggggaagatgactggcagagaaaaccaacctgtaagagaaagcatccccaacattcagagagcccagtgtctgcctgcgcagagagcagtcacagcctcaaaatgaggaagaaaggggaaagcctgccagttcaccagccatcagaggacagaagccgatatccatgacgtcagcaaacgttttcccaccccatacctggctcacgacacccacagccactgaatcccactagaacccagtgctgggcatgaccgtggtcttggtgcctttgagtcatgtctctttcaatacaacagcaatcaataaaaaaccccagtaaaatgtggttaaccacaaggacatccctccccacccccaccccacccccatgtcagcactgtgattcattcagtcctatgctcttcgctctaatatccttcttcaaagaagggataaaagctctactcttttctgggccctgcttctctgcctaggactcccaggaagccaagaactgcccagtatgtgggtagctgtggctggggaaagctctcttcagatcttgagatgacagggaggagagatgcagtcttcaggccctgaaagtgtcactgaattgaaagtgtctcctctctaatcaatgctaccctgccctctccccaggtcaccattaaaataagtgctgactaaggcatccgctggtcaccgcttcctctattttcattcattaggaatcggtttggttgtgtcaccatttccttacctgttagggaatcagttgtgattacctggccgtgtgtgtgtgtgtgtgtgtgtgtgtgtgtgtgtgtgtgtgtgtgtgtgtatgaggtggaagggaaggcaaagcaaggagagccatggaagaccttaacctgtttctatgttgtgtgttgtcgccactctcctgggaggtcccttcccagccagtctggaaggatgtctgcctgcagtccagttgtcacccagcagtcattgaattgtgacctcctgacaccctcaggagacagctggctgcactggcacctggcattgtaaaagcagagaagggatgcagtgttctgcagccttgtgagttggctcctccatccatccttccttctaatgcccagtgagtgagtgttcctaatgtctcctctaaggcttgtattgtaagcctctggggtgaatgtccagaaggcaagtggggattcatggaaaggtgcccccccctctgtgtgtgtgtgtgtgtgtgtgtgtgtgtgtgtgtgtgtgtgtgtatgtgtgtgtatgtgtgtgtgtgtgtgtgtgtgtatgtgagtgtatgtgtgtgtatgtgtgtgtgtgtgtatgtgtgtgtgtggggggcaggtactcttcacatctaagctgggaaagaccaggccgaatgttcacagactgtgctataacagcatcttcacttcctttatgtgcatttagctcatctggtagcgtcctgcactgaaattctttcacgtgcagaaccagttacctgttgccgagaaccggctgcattccttttattcacactaggtatttggtcagcattgctcagcagtaatgaaaatgctcatggagaacttcctgtggccaacatgttggagactttgatttgtttgttcctggcagtcataatatttgtattttcttcatttctcttttggagaaaacaaggcagagagaggctaaactactgtttcagatgattaagtggcagaaccatgactcctgcacaccaaacccaccgttgtcattcactcccagtaagtggaaaggccaagtccatggccaatcatgtcacccaaagcgtcagcgtcatgtatgagtcagagcaaaacccctgggaagaaaatggcccaggtctgaatatttgaagaaagagattcccctctagaaatagattccatttaccccaatatttcgaatcaaagtgcattggatatgcaaaggtctgaagctgaaagaaggccatatgagaagtgcttgttagatgacttaaaaaaaaaaaaatctgaaatcctctgattagcaaacagtacaaacgttgttataagctggaagattttcagtatctttatttgagttgcacgaagtggccaaatgtagtttggccccaggctgctgagtgtgtatgtctggtgccaagacaccactgagctccgcctgagataccaagcattccaggcctgttaccttgtaagtgtaatatttaacagattgttttcttctctgagatgaagagaagaggtaaataggagaggggctgggtggacaccgcctagggttccctcattagagggaggtttgagtgggggaattacctgggaaggtaaacaaagagttgccacaaacaatccctttgctgacaatttggcacctagaaggagataacagaggtgaaccacgtgggatgcccgcaatgtgccggatacagtattcaggatttggctttggtgactctattttatcctcactgtctataaggcagactctgctgaatcctccttggtacatggagaaagtgcagctgagtcacgtgtgtgacccactactaacctttactgtgctgctctgaggcccccagttatatgttagcacagctggtataggccaggaatgctaatatctaacacatcaggcttagccaaatgggccattgttttcctttcttgaaccttcccaactgccctaggagttaggtgttgttaaagtcttacattcctggaaactgagtaaaaggtcaagctgtttgctaagggtcacaccacagtgtgggagagctggggacagaatcctgtatgctgactatcaggccttagctctttttaccttagctcacaacatcttatttggcatcaatgacaaactcacaggcaaaatcctggaagtctggaccagcctggccctcaatgacaaaaggagggcaagtgttcaagctgcaagatggcttagtcggtaaaggcagttgcttcaaagcctgcctacccgagttccatcccaggctccacatggggagtggggtgtgtgtgaaaagtgacaaacatgcctgcatgttgtcctccaacttatatatacactgtgtgacacacatgggcatgtgcatgtacacactctcaactcacacacacatacacacacacacatacacacacacacacatacacaaacacacacacacacacacacaggcacacatatacacacatacacacacatacatacacacatacacacacacagacacacacacacaaacacacacatacacacacatacacacacacacaaacacatacacacagacacacacacagacacacagacacacacatacatacacatacacacacatatacacacacacacatacacatacacatacatacacacacacacacacacacacacacacacacacacactaacacaccatgcacacacacaaaataattctcactttattttaaaggggttgtgggagtgaggcagagttgtaagagtttgtattgaacactgtctgaagagctgcaaatgaaatcttttaggtgtgtgagtgcatgagtgtgtgtgtgtgtgtgtgtgtgtgtgtgtgtgtgtgtatacatgcatgtgcatgaaagcattgcacaggaacatacatgtacagggggacagtcagggtgaaggcagagaggaactattttcaaattgaggaaatcactaggtgacaaagaagaacacttgttgtccttgcccactgttaactcccatccctttacctgatgagttgaggttaaggagaccctgcaggttggattgccacaattatccttaattcatccacaaaataaaccccagattccctttgaagtgctgtggtgaaaatgcagccttggtgttggacagggccctgagagttcctccaccccctgcagggccagggctgtcttccaaggagggtggaaatacaaacacaaggacctccctcccctaggccccttgcaggagccctttttcagctactggtccttttgccttggaagattctgctttggttgaatctcaccccaaaagcaatatttttagctagaggtggaaaattctagaagcaaaggtgtgaagtgaagctttttggtgagtgttgtccatggaagagaagtcatcctagcatgggtgagatgtgctccaagacacacattcaggctcagcagggctgtgttcacaaaggtactcgatggctgaccactgacgcagtgactgtttctgaccagctggcttgtgcttctttaataaagtggggagtcggggtttttctttgtggacaatcaggtttttctctgctggcctcacagtaccactgtgtctcatgagcactgggatatagagaccaaacccaaagggtgactttacataattgcaaatgttcaggtagaagagaggcaaagtgactggcttgaaatgaaccggttaccctttgggtaaagaagtctgctttgggaagatgagttcttgaaaccatcactccctgttcctagcccaaggctaaggtcatcctcaggagccacatgtgtttgctacgcttctgagagcattcctttgcaagccctgggagtgtatgacacagggcatgctgtttccattttacctacttcagaaaacacatgtctgtgagactgatgagtttgttacccagcccaaccctactgcaggaatgggccccgattctgaaatctgatgtcagcatgcaccaggacaggtattttcaagtgaagcaaagcatggatttctgcatcaagaaacagacaaagactccctgaattgcccgtgtgtgtgtgtgtgtgtgtgtgtgtgtgtgtgtgtgtgtgtgtgtgtgtgtgtgtgttgtgtgtgtgtgtgagagaggagagagagagagacagagagatacagggagagagagagagagagatacagagagagagacagagagagagagaggcaaagaatgtcctgtgggcctcttttggcattgggcatcttggtaagaattcccaagagctggcactccttgtaggagaacttcatccactcacccatcatggatgtgtgggatgtttttgtttgtttgtttcttttttctttttaatgaaaggatttagccacaactactgtgtaggggactcacaagatgtgaggcacaggccatgagtcagtgtttatggagttagaagttgcagtggagtcagcctgcatcttctgaagaactttgcatggagagtattgcaagcaggagccacggcctttgggtttccccatcaggaaaggtggggtgtaaacacgtaacagcagaaagcccatgctctgagtgtcagagtcactgtgcagtgacatgacccaggcacccttgccctttactgtcacttttccacactacggagtttaccatttgtaaaaatgttgtggttattttaacagttctacagaaatgaggtgtacagaacgtttcatcaaaggttatgtaaaccatataaagcaattcgctcattcccctccagaacatcttgattcattaaagtgaagcaaaggaatggctcagtgatggagctcctgccagcatcggcagagccctggtgaggtccacccccggcaccaggggaagatggagagggagaatgacactaaacatcgtcagggttttaaacgctctaagcattgggtgtgtatcttatttttcatattttattattttataggaccagaggttattttctttcataagtaaatcatccaagtagctgtgtgcattgaagtagattcagagcaaggaaaacaacacagtagaaaagcaggctcgtaggatatttgaaagtaatagaaatgcaagcatgctaaaggcactctctctctccttaaaagattcttaaacatttaattagctgtgtatgtctggctgtgtgcatttgagtaccatgggggccagaagagggagtcagagcccatggagctagagttacagtggttatgagctgccagatgagggtgctgggaactcagagctttaggaagaacagcaaggacttttaaccaccaagcctctttctattctgctgataggaacatttttggaaaacaaaactctacctgaatcttgaaatgaaggcctgaaggtgtaaaccaattcttctctggcttcaccaactgcctgtgggatctctaatgtgttcagttcaggtggggttgggagagggggtactgtacaaggactttggagccaagaaaacccatgaaggacaggacggagggcaagtaaaaggggatcccaccaaaggttgtcatctcagaggctaagcgataacaggacagagaaaaaggctggctccaggcctctggcagttgttgaaatggagtcctgtggtttgccacgtggctgtcttggtgcaggctaagagaactgcctcactctcctaagccttggcccactcacctgcaaaaagggaatggaaagcgattgccctggaggagtccttataggcagcactgatgtcatgaggtcagactcagctactgtgattggctcttgacctactgagactggcctcccaggtactgacttaaaacttgtctgagtcacctaattttaaagttcaaggacagtccacacataccatagcttctgaccaaaaaagggcagaagttaaaactcaaataccttaggaattattgtgagcatgaacttaagggtgacctgtggggaagacccacaaaagtaggatgttgacaatggactgcaggcacttgagggctcaccactgaacactctgcaccccctataccaccgtcatccatagaaccagtgacagggtgaccttacatctcttcccagagggactggggatacacactgaagcccgagtgagcactttggggtttgaggtggatgtgcatgagaaggggactccctacgagtaagacctgggtttcactcctttgtcctcctcctgctgctttgctgtgtctgcctcagaaactcagttgccttatctgcagactggaaggtgaagctcaaaagatatttagagtccagaggatcagataagaacatgtaatcagatgcttgttgtctgaggatggcttctagggctatgtgcactgtgtagtcttactcaacacaaatcagcaagatgacttctttccatgagaatggacatacttgggtctgactagagccctatgaagtgaccccttcttcacaagcccaaagtcatatgacttcagaggccagtgggaattcctcctaagaggcagctgtccttggtcaaaacccttgatcccttggccatgagacttgggagattgtccgtgaaggctttaataagggcttagcatccacatgtcagaaccaagacagaagtttcttcttccttgagcttcagcagacagctctgagtaggagatgacagaagtcctggccagagaagacttgccgaaggaactgtgatgtgggtcccatgttgtctctttcaaaacacaaatcccctttttataagtgcagctctactgtagtggtgccttgctctttttccatcttttctcttcggtaaattgactattggagcagttaaaactagaccagactcctgtgttacagtccagtataacctgtcatccagttctctccttagacctcatcacaggagactctggggtgtctctggtcccctctgtgcctaactctgttagaaggctcgttcctataccaggcttggttgttcttggatttttcttttcccattctcatcccttgaaggactacaaagcaagtctttatgagacagaggcaggggacagtcaaaagactgtgggcttagagtcagtaagacttgggtgagtttccagccagttttctgtttcagctgcatgcagttgcacagtgacttgtctacggtaaaggcattcttcactcaacagaaaggttgggaggggaaattgttcactccccagtctgcgctactcacgcactggcaggcatatgagatagccaaaagacaccaaggtaacaaaggagatgattatgcccacgaaagccctttgccaatttgtgttcgactatgggaagtgctgatggcaatttcacttgctgcaagtttccttatatacctggcttttagggatctaattagtcatcagtctattataaaaaacaaacaaaaaattttattacatttattgtgtgtgagagagagggagagagagaaagagagacagagccgtgtcacctacccacaccaacaactcttgcagccctaagagcaggtggtttcctaagacttgtcctgctgagccagaatcagccgtgccacaggttcctgctaccaacagttacaagtggtgaagcaggtgtggccccaagaaccatactgttttgatgggtccttgaagcagggaaaagggtggcccctgtccacaaggttttccatattgccgctgccttgagacttgtgacatttcctatagacatttgtgggaaagacatgcacttcagtgtacataactcttctcttttgctcccagaatagcgttaacaatatgactttacatttactatttgctatgctcacacttctcacctcttgtcgttcttacagttgttcttagcagtgagtgcgcttggatatgatttagatacatcatcgttttctacccctaactcagggctgtctgctgcagctcagggaagaaacattggttctagttctaacatgtggtcatgttaaaaagtttcatgcccagaggactcagggtttctatgcagggtagttttctctctactacccacttgcctcctaagtcatgttcctctgaggaaaacccatgtcccccagtgtctataaactgagggcatgtttaacaaaactttagttagaaccaaatagctaatggctgtgcttctgaaagtaagtagtcttggtaaattcaaaatgcatgttacctttttataacactatacacacctaaaaaggactctataatactccatatgacaaaagtggttaaaacacagggagaaattgagtgtgcttgcaaagagctagaaatactccctctgagtgctgagcctaggctggaccttcaagggtgagcagaatttctctcatgtaaaggatttctaggtgaagaatgactggcatgttggcatgccagaaggctcttggcatgtctggagactggaaatgatatggcatgcttagagtagtggaaaaacacagggtgggggtggtagggaagtggctaggaggtgacagaacactcctgaatccagaaaggtagtttggggccacaaggtacatggataagcatgtgaaacgattgtctgtttgagtattttaaatgtgttgagacctcacttgttggaggttaaggaaaaggatgataaaaaatggacacgggcttgcttcgtgttactgtgttctcattggaatgacctctcaagatgtgtgctgtgtggtcttgctcagtaaaagtaagtttcagtgcagtagtaacaccttgcctgtatcattttgcttatcaaaactaaacacctgaagcatgcatggtcatatttgggtctggctagagccctgtaaggggatcctaagttcataggtacagcgaggctgtgggtttcccctccaagtgacatgacttcagaggcaagtaggaagaagcggcagtcctgcatacagaggtttcatccttccggccatgagacttggaagattttcactgaagggcttaacacagccacgtgtcaaaactaaaatcaaagtctctttactgagatgccttgagtcaggggtacagaatggcaatggccttgaccagtgaaagcctgaaggaacctcatttcaaacaagcctggctatgacaggggagtgcatgccaacgttgaatgtctaaggtagccaggtctctgacagcaacacttgataaagtattgtccaggatctctgttaggtatgaggcagttgatctgtgtgtaatggtgtcatggtgcccactcaaccttataatagtcacttctgatagcctgtcccacctgcaacacttcagattcctacacagcccttgggtactgtacaggatctgtccatgcatgactctttccttttaccctcaccagactctcaagacaagatactctgactaaagcttggagacacagtcacatctttgttgaccctcttcattatactagactcataaaacgcttttaggattctatctggacaaaacagatgttctagagtgctgaacatgccatcaaagttcacatgtctgcctctctactttccctctctgtgaccaactcctattgacattagaccacatggacaaaaatacaacatagaaactgagacaatatattgatgtcttctacaggaacgggtgctggaaccagaagacccatgcaccccagagaaacggatgtggaatcagactctgtataattagagaaggactgtggaaaaggcacaattatttctagagctcccagcttccttcctaaaataaaataaggtcatgtacagtcagaaatcaagtgagggttccttttctgtttctctctatcctcttcattgaggaagggtttctcccagaacctggggtttgttaattgggctagtctaactatctagtttgctttaggcattccttgtctctgtgtcacaagttcacttggtggcttttatgtgagttctgggcacccaaactccagtccttgtgtttgtgtggtgaataatttatctactgcaaaatctctggagccccaactagagtttttaagtctgtgctgggctgcttcaaatgcctgccatatgtcaactgagttcttgatggaaaggaattcacagctgtcctgtatccagagggcaggttaggaagcacaatgaatgacaggacagttatggatggttttgagcacccaaaagtgatttttgtccctgagagggatgatcctttttggcgcttgcacaattttccccattgctctaattccctatagcccaggttctccttgttcatcaggaacaaaagagcaggcccgtctaaagacatcttcatctcccaacgaatcacaaagactccgccatacacgctctctttcttcccctcttctcctctttctccttcttcccttcctccttccttctgccctagtctcacctccagcccattcccatagcactgtacagggaagacatttgtatactgtgagctgctggcagctggtccctgaacataaatcatcctccatcatggttccttccaggtactgtcacccttgggctactgtgcacttagaggaggaggcttctgcacttggcattgaaaagagctgctcactgtaacaaccgagagaaggaaccctttcagaactggttgaaaggcagagtctgtgcttgagtgttgtatctcttcaagccggcatatgatgaaggtctcacgactgccttcttagcctgctgcatttagagtgcatgacacaggggattgggtggctctaccggctgctgtatatttcacagcggaagctagacttgaactcagaaatggtcttagtcacagttctattgctgagaagagacaccatggtcaaggcagctcttaccaaagaaaacatttcattaggggctttcttaacaatttcagaggcttagtccattatcatcatggagcgaacatggcagcaggtgggataatggagatatagctaagagctgtatcctgatcccacaagctggggatggggccagtgacagagacagagagactgggcctgacatgggcttttgaaaagctcatccctagagaccacttcctccaacaaggccacaccttctaatccttctaatcctttcaaagagttcactccctggtgactaagcattcaaatatctgagcctttggggacattattattcagaccaactcagggatcaaaagaccagcattgagtcagcactgagaagtgaagtcatttcaactaaaccatttgggctctctctggactatggcttccccaacagaaagaagagacactactactcagcttgcagaagtaccaggctctttatgtggcactttgtgtgatggaaagacccagaaagtgccaagggactgtggttagcattcatcatcatcctatggattaagtgttagaaagacaggatgaacttgcttttactttgtgtttttgtttaacacgtgttatatatactaagagatgtttgcctggacctgggtcataggatgggaaatatggtcggttcggcaggcctgagctcccaagactctgcccatgagcatcttggttgggagagggaaggggcctttgctgtggtaacagagtacatgtgtgagtccccctcctggtcagaggtcagagagaattcccaggtgttaaggaaactacagaaaatcgggagagttaacaagtggcactgctccaaactcctccaagcagcataggccagtgcactcagggcagaatcacatgggcactcttcagtatatagtatgtggtgtacaaaccagtcacgtaaggaatatagattttggatcgaaactttcgtgctctacacacaaatgctaaagcaattgatctgggggtagttgtggggctgcccagtttctcgccttttacacacgaggaactcttcctgtcatgatgtttagtctttaaaggggatccaatgagaccattgcgatatgacaagaagcgggtgtcttctatgatacgatccacatcccccaacacaataagagatcccacgggcttcaggggagagcagtctcctttgtgaagcctcccacctccttacctttgtttaccgttaacttcactcaagttactatgcgtgcacactccatactggtgattggtttaatgttcacttttcccctaacacgttgtcaaagtgacagcttgtcttctgcaaaactctttttaaagatgatttaatagatatctgtcaagacagataggaaagctgttgaagagattaaatagtcatttatgctacttcatctgcccagctgcgtatgtgaaccaggcatgaggggaagtttcaacccctagtcacaaagctttctacaagcctcccaaagcaagcagagagatagctcccaagcttgcttccaaaggaaactcattatttcttaagaattctcgtcccattcttaaaatcatagcactgtctcactttgctgaagtctcaaatgaattaggactagtaggattaactctttggactctctgggtattgttttgttccatttcctttcccagagtcccccagagtggattaaaactggaattctgcagccatcacacacaaaaataatgagactgtggctggagcacttgcactcacctagctcagttatgaaagtagcacattaaacatttggaacggcttggccacgggctgctgctacaccaaatactctagatttaaagactctttgctcctatttcaaatggcgaccagaccttgaagcacagaaagctactcagtgcctgaatgaacagattctgaaaataagtattgtacccctggttgtgctccagagtcccttcctggtacagttcatctggattcttgtaattcctatatgctcccatatcttaattgcccatagctgtgtggccagtacaaacagggtgagggaagagtgaatacccactggcgagcgccatccttcgtcctggaaacctgtagtgttttctgtaaggccctgagtgactgtctattgaaatgccagtatagacagtgaggaatgcagcgatccttccaagctgtgcagacatctcaccatctctacagttgagacgagagctaccatttaacgtaaagaaaactctcagcttttggaggatatacatttggaagctagtctgagtgctggttagtacaatctgggtatgctgggataaagtgggttccagaactttcctcaaccctgtcttattggctgctttcagtaggcatacagctggcctgctgacctactttgaagtgtgctactgggtaaatcagaagccccatcatggtggcaggtgacagagtagtttcagacttggctgttccacctggaatcaagcctcacagtgcacagggcctggaaagggagtgagtttagtgcagattaaggtctgtatccactttatccccatgttccttatctgtgaatttaggttatctagagaaataagcaagactattgtctgacttgataccttgttccctgaagcatcatttaacagtctgattgatgctcaggtccaccttcaaatgcctctcagtgtgtcctcctgcaaaagcagcgtcagcaaattaaatccactcggaatagtgataaatgacgacccctgcacacatacacacctcagggcatcagtgtaggatgacagtgtcttggccaggtgtggtggccacacctttaattccagcactcatgaagctgtcagatatctgtgcattcctagccagcctgatctacagagcagattgcagactagccagggctatttagtgagaccctgtctcaaaaagaaaaaagtctataaattagtactcatggatgagttgactcgtattttattatgcactcaaaatgcatagaactgtaatagaattgtagtgctgatacaaagtaaaaataaaacaaaagggtaagttcagggcaggtaacagtgctctgctgtgcatctataattatgttcaggcttaagggaataagtttaagattgaagcaaaaggaacaaccagaaaaagtgaatatgaaaaacagtggaaggacatagataggggttatttgtatagaaaagacatgatgaggaaaaaacgtgaaagctggcctcagagttttgtgagcaggactgtggggcaccagaagtctttgttttaggcgacagacctggtcctctcctggagccccgtgattggcctttgcctgggaggacatttgtacagtgggagcttccagaggcagggttgtgctgagtctgagttatgagggctttgtcttcgacagagggttgggatgccactgtcactgggcacacctgaggatcacaggcagttcctccacacacactcacaccacacggaagggtcatagagatggagcgtcacgtacttgctttacttccatcaaactgggcagtcagatcacctgtcccctttcctgtttgttttctgccatgccatgggtttaagatgttcccaataacagcccatgccgcttggttcagttggtaaacaacttgcaattcttgcagggtgtgccttgccacttactagctttagtgtcaaggtggagcaatgcatcagcacagtgtctcaaaggaattaagggactgcctttcaaaaaagaagaagaagaagaagaagaagaagaagaagaagaagaagaagaagaagaagaagaagaagaagaagaagaagaagaagaagaagaagaagaagacatgaagaacccacgctggctggactggttaggttttttcctcaactttatacaaactagggtcatcaggaaagaggggaccccaattgaggaaacaccctctgactggcctgtagacagtctgggggacagttttcttgattgatgatttttgtgggagggacatccctgtatgggctggggagcataagagagacagccaaacaggagcctgaggagcaatccagcaagcagctcctccgtggttctgttccagttcctgccttgagttcctgccctgacttcctgatgggctgtgacctgggagctgaaagctgaaagaagccccgtccttcttaagctgtttttggcattttatcacagcaatagaaagcaaactaggaccctggctgtcaggtgtttttgtgtgttcgcttgcttgcttgcttgtttttaagaggtgggcagtgttttcaggctagcaaggagcttctctgcctgtgatgagtggcagaggtgcacagtggtcactacagagtccagggatgtgcaatgcactagcagagagagtgcccgagtctgtctgtctatggtgttcgcagcacagaaaagtcagatagctccacgatgtcaagggttgtgtgttttaacccatgctttgccagtgtttggtgtaactgtagaaagatcttaacccttcgggttctccatctataaagagaaaggagaataaaatatggttcttattaaggattcaagatgacttgttaaattgctccagttaaatttactaaagtaaccaacacatgttgtcatcattctatttgggattgtttagagccattgctgttctctggggtacttgtatggatgatgacattgtgggtggggtctcagcctctggtggttcagaagggtgactggtatgggattgcctcctggacatcagagaacaaagtacacagctgttttgttatctatctgtctgtatatctatcttccttccttccttccttccttccttccttccttccttccttccttcctttccatctatcttctatcatctatctgtctatgggtgttttgcctcctccaccatcctgctgttcaaatgtgggtgcagccatgctctttccatgattatcttctctggattgtttctatgttagctggtagccttttgcagacacagttggcttgctttttagtacccacagcttttactgtgcagcccagaaactcccagccagcctggaggtggctgagaaacctggaactgtaagtgaaatgggtgtctccaagaaggtggggttttatgggggtaatggaaactttgggatagaaagtagaaactccatgtctgtcacagttcaagaaagccaaacaccatgggccagcattactgttgttttacttttacatttttttcaccatgtaagaaggggcccaaacactcctgctgacagtatgcacggtctcaaatagcagcttgatgaaggccaagtcacacaagctgatgctggcacaattaggctccccactgccagcggcatgtcaagtctgacaccgtccccctctcggagactcccgggtaaattgcagatgctgtggtgccctgttacatttaataggtgggatggccggagagaaaatcagaaaccacggcgtatgtgctgtttatttctcagtcattttatgttaaattgctgtgacttgaatgtcagcagtgttgggatgtggtagtgaaactgaatctatatccagtgtgccaagacaaatttcagaaaaccccaaaacacaattgtcttggtttcttgctggctgtgcctgtgcacacacaaataggagctgatttattgccctccaaccgttgggtgggttgattgtcttgttgcattctggggcctgtctaataaacccccaaactacttccccacacaccaaggatgtcaggaatgagggaatattatactcattaagcatgtcacaagtccgtaccaatcactgctcagctgcagggtggtggagtctgtgatgggaaaggaaatgagaactctcttctgctcattggaaggtggcagcagagcagtgcagagatgctgctagggttggagcacatgtggaggaagtctgaacaacggtggacaatattggagttagggacatctccagtagcagtgttcaactctctgaaaccagcgcacacgagtgggcatctgttagggagtgaagatgtagctcctggcatcagactgtctcaggctgatctttagtgaaggaagaccagtttctgcgtgcccttcttgcaagagcccaccgaatggcagtgtcggtactgggtggtgttcacaccaggcactctgtggggctcttctcaccaaaggcagtgagtgtagaatcaaagtacatttgacggaaagaaccacctcaccttgatgttagctaaaagctatttcactctcctcacccttcatttctgtatctcgggagtgtgatgatcttctctgcagagaatgcaatatgatcagtcctttctttttatgggaaggaggtggtgggatgggcatactgtagtcatccctagctagttcatgaattgaggagccagaagggaagcctgattaaatgcaatgtgatcaggccagcatggtctgtggcagaagttctcgaaggtggctgtgagaagaagtccctgccattcaaccaatacctatgggatactgacagagcccctcgggttgagtggacgttctttaacagtgggatccagggctcaaaaacaatgtggaggccatacaaatgagaatggtgtgaaggaccaccagggttctgtaaggacatggattcgtctggcagcattggaacttaatatcctggaagataggtgggtactcctactcccctcccaaactcttctggagcactaggaaactctttacacatcagtgggggtggggacatggctcagaagagaaagcacttggcatgtgaattcgagaactggagttcagatccccagccatcatgtaaatgcctggtaggtatgcttgtgatctcatcacctggtaggcagagtcagaggatccctggcacaagctgggtagaccagctgaacccagaagctctgggttcagtgagaaactctgccttggtttataaggtggagaaagaaagaagacacataaggtcatcttctggcatacacatgtatgtacacgcatgtgcaaacatatggaaacatacacacacacacacacacagcaaacaaaagtcttatatattcagcctgtgactcccttgatctacagaaaggtcctttacacagtcatggagtgtttgaaacccctaagggatttgatgcccctaagtcttctctcctctaggctaagcattgcaagcttccctcagtagttctccatcctggtgtgtgttagaacttcccaaggattctagaaaagtccattgtgatccacttcacaaaccattgggagactcagatatccagtcatcggtgactttaaagttccttaagacaaatggtggacaacttacagggggagattttgttgttttcttttgaagatctttagagatcttgtattgttgtaatctccgtttcctctgtagttttaaaatatgtataatgccttaccaaatgcttaggtatccctttgtgcatctgtttttatctgtgaccttctccccccacctcctttatgtcagtggttctcaaaatataaggtacaaggatcacccaagaaacgtaccaaatgtgaatcattgtccttagtctttgagaactgctgatagtgggatgataacccatcactgtaatccgaccaggcagagctccccacttagggagcagatcctcacccacactgcagaaaaggattttcaagatgagtcaaaatgccgtgaagtaagcaagtttactaagacaagataagggatagtacacacctcagaatcaaggacagatatttagagagatggagactttagaaaaggccaagatatgcgtgctggcttcttgaaagactcactcttagctgttactacagtgagtgtataattttaagtcacatcactcaaagagtgtaattttcaacaaaatttaaagattacatggtttaaaagttaacaaaaatatatgagctggtttatgcatttatcttatcttaaagaatttcctctggcagatgaaactgtaaactagttttatgaggtgtgttgtttagatttaatgtgaggggaatgtttgacagttaagcttgaggccacaaacattctggactaagtaagagatggtttttaaacatctttgttagagatgcctttgcaggcaatttcaattttatcagttgtgcacaagtttttcaactctcagccaacaggaaacacaaactagtcccaggatgaggggtttctttcccttcccacgttttcctaatttccactcttgtcagaagaagcctgcattgatttggaagcttcttatgacttttaggagggagtccatcttggattctaagtgcagatagcttatgactacttcacaaaacttccacccccagaccagtagcaagcaatcccttgcaaacccacacaatctatgtttcactttgagctactgacctttcttgctatcttggaaattccccaaggacaaagaccactactgggttccccttaggcaactgctactgttggactgcaggagtttctcctagtccttaatgatcttgtttagcaacagtggcttaaccacctgggaatcagtcagtgtggcagtaggttgtatgggggggaggggggagggtttctcacatctggtgtataataaccccacaacaatgaccaccatttatctcaggtcccaaatgagctcaatgctgtgagcccagaacctcattttgagaacccatgttttaataaatacagcaaatgcctatagatccttgacccaagagtctgacaggtcatatgcctttccttgtcaattttgtggtgtaaccaaatgcatgaatggatgaataaattctagaccagtgattctcaacttctctaatgcttgcagccctttactacagttccactacagttcctcacgttgtagtgacccctaaacataaaattattttcattgctgcttcataatgtaatttttctaatgtcatgaatcataactgaaatatttgtgtttttggatggatgatcttaggccactcctgtgaaagggccattcaaaccccaaaggggttgcaccccaaaggttgagagccactgaactgggactactgaacaaaagccttacctggcttaagggctgagctctggatatcctaaggtatttcttaaagattctatttccttgttctttgtcagaacatatatgtaagacctctcttcacttttgtttctttgtatttttgttttgttttgttttcctatgtattcctggctagcttaaatagttgaatatagtctaggctgtaggctgccttcacacccatgagtcttcctacctcagcctctaaaatgctgagattatgagtatgtgctgttacacctgttttgttttgttttgagacctcatttgaccattatgagggtggtaagatggaattctcttgtcacccttcagagtggccaggactttcagtaaaacaaggggaagatggtggaaactgtgaagactctggtgaatagctcctccccatgaagggaacaggacttagaacacacagagccctttctacagtgcctggggcatgctgctgtttttgttctttctctttgcctctaatgaattctgtcaggcagcaagagcttctctcccaggcacattcacaaaggcccaatggccacttggcagctttgcaagggacctggatagagatttgtgcaagatccaggactccaactttccttctgcctgctcatgtcattctgacagcaccattcagtatctagttgcctggatatgtagatgagtcagaaaagccggaccacgtccttgctgcattcagccaagcttggcttaatttggtattagagctgagatccccatcgagatctttcctgtcctgagatcttcttgttctgtgtggctgtagcagggataggtatgcaatgtagagaatctctttttcaaaggaaaaccattacgtctcctgggcaaacagaaaaagaagggctgcagaaaattctagaacagctggcaatatagctcagttgtggagcaattgcataacttgcatgaggccctggattcaatccctagtattgctaggaaggaagcaccaggaaggaaggaaggaaggaaggaaggaaggaaggaaggaaggaaggacaaataggaaagaaggaaggacccagacaggaagtacacagataggaaagaaggaaggacatggataaggcaggaagggagggagggagggaaggagggagggaagaaaggaaagaaggaaggaaaagagaaaggaaggaaagttggtcatagcatgtacaacttgctgctttgcctcatagtttgtctgtctctgtctctctcactgtctctccttttccctctggtgtctgcgtgtttgagctatttgatgctgtgcttctttggaaccatgttatttctacactgaaagaccctcacaggcacccatggtcctgccctttacctcagatgttcagtccacctgttgctagggtcccccaggccctagcttccagtgatgtcctatcaagccagcatattcatcccataaatctgttgctacatcccaagatatggtaaattccacagtggcctatgcttggtccctagagtgggctggagttgggttcctgctcagtgttcctctgcactctggcactgccagcaaggaatgtggtagttgccaccaagaaatgacttgggttgtgttcctgaccccaagtcttctaggtgtagaggctaacagtggtcactaggtggtctaagcacattggctgaaaatggggtcacagagagcaaagggtagaggcagagaaccccgggagggtaagtcggtgcagcctcataccccattgtctcgtaggactttacttgcacaacatgaattaaaaagtttttaagggttccaagatgccattgtggatcattcagccagagtgtggtccctttctgagtatggggaccctgtgtatctgctctggtcacttagcccaagaagtcagctctgggctatgaagaagtaaataacttcaaataaaagacacccaagcccatggtgcatatgtagagagaacacaatttatataataaattagtatgtgatcaaatactacatttagctttctgtatagttactttgcaagttattgagcagttgaatccctgccctccagctctccaattccccaaatttgatttagcaaagtgaggggagactgctcaattcatgacattcagtcttctttgctcacgcttttctctgagtgcaaggcacatgggaaaccagcagagccaacactggtatgaaagccagagggctgaaggaaaatcagtgtgcttgagttgaaaaagtgggtcagaaatggagagggaggagtgggccaggctgtcagtgtgggtaagttggccctggttgagcaagagtacctggccacctggcgagaatggaaactgggattggaattacagaggattatagcaagaacccatcccagagggggaagtgagttcttggaggaggcagaggaaacagctcactcctccaaggctccgtgggtggatctgggctgcacaaaccattaaacccctaccctgcagctctggcacctgagccgaaggagggagcttgccttgttctggttctggttggtgctaaaaactgacccattacagttcgagcaatttcccccaaatgagaggacgtttggcgtattggtcaagtccctcatccaggtcagggggcttgtgatcggtaagcaaatgacagtaggggacagttgggatgctcccttaaaagtggtggttcttgagttggcagcttttattgagttcttttgtcacatcctcctccaggcctgcttgcttcccttggctccaaaacctgagccgagcactggtccaggctgctcagctatccttcctccttgcacattaactgcttttatttacaaaacaggaatctaaatgcaggttggtattatcagccagttgaaatataagctgtctaaatggttcctcgagccagcaaacaggaccgttggcctgggacggagggaacatagctgagggaccgcacttagccatcaagctgctgttgtaaatatttgccgacactccttcagggctcgaaagcccaggacaggatcatttggagatttgcttagaagaagtagaaacaaaattgacctcacggtctgaggcagccataaaaaggaaatgcgtgtgtatgggcagaagaccagaaaggggggggggaattgttcaaagtttaataaacacaaaagagaataaaaataaatctgggaagcacttatttacaaacttgatgaaggagaagattgtggcagaggggtgtgaaagatggctgtttgtggaagtagaatggagatccagaggggctccatgcaaagaaaaaggggaggggagaaaggaagatgtttacactggctaatgacaggaaacacacaaaattggtcttgctcttccaggatgtgctttcaaaggatgtttgaagcctctgctgtctaacacccaggataaggaagatggatgtggccacgcctcctgtgaaaggttctggccaagagggtgtggagagccagggagcctggcctgctctgccagggcgaaggagctgttttcagctgtgctgctcagcataggattaggagtcatgattgctgggatgggtgttttccaagcaaagaaaagtggatgttgtctcagcagctaccttataggactgctatgctagggaactccaaagactgtcctgttgggctgaaggcttcctgccatctccttcacagagggccatcacagtgtctcagccaataccttcatttctccaaaacctgcttattttggatttgtggggctgtttgtttgtttgtttctgagagttctggtttgccaggtacaaagcctggattcatagggcaactgacttggaattcatgagcctgaatttgcagtctcaaggatatggggagagataagaaaaggtgctcatgaggcaaaaactgcagacctcctaaagatgaggggctggagtaccctcactccagcataattgtcacggatttatgagagctatttatatctgctttaagatcggcaagatggcttgtttaataagttagtgttgccaatagcctgatacctgactcattcaggatgcctgccgatgatcaactatgcaaacagacctttgtgggactctgtgcattcagaagcctgtcctgaatatgtaggaggtgggaggggaagaagtcccttgcaaatagcctcaactttccagattttagaaatttcccaggggaaagcaaaataaacacaatgcagaaaccatcagcacatttagagagaaacataaccatgaattatgttttaacgaagccttgtgaatgcttctagattagatggaatattccagaatgaggaaggtacatttacagaaaattttgcaaggttatagaaacatactcaaaagccagtgatctgtgggtgctcaatgtgggaggtggaatcagagagttaggacagcttgctcaggtcttggggtagcctcactttcatactcaaaagcaatgggagttgctagaaaacaacagcaaattctaagcaatgctcaatcttgaaatcgttgcatactatccatcataaatgctgccttccacaaggctccaaaataatggaattggtgctttcttctttctgagctaggattcccttccgcctacctgcagattgtataacccacccccaagaatttgatggctggaccagatgtgcatagtttgtggatctatttttgtttttcaggtttccttatcataacttggtcatgtgcatgaaaacccaaactctaagagtaaaaataaggactcagtccatgaggctgaataggagtggagtatttggagccaaactttcaaggaaaaaaaacacacgggcagaaggcttgccatttaggagctattttcttggcatatctgattaaagtgtatgcaagcccggcagccctctccagccatcaactgtcatgaacttgttccaattcgtaaccatctagggttttccactggtctgtcagccttcaaaagacagggttaactgcttgctttcagacgtggttggaaatggtttgttaatcgctcttaatctgcttctcctggaactaaacacacatgttgattttcattttgttcttggttaaattgttaatggtattaaattggccattggaaatgaaattctgtagacatttcccatatggctccttgggaccatctcacactgtggtctttcttgagaacatggtgggtttaatctttctcaaccgttgccctaactctttacagatgccatcccgcccactttctacagaccctacttcagaattgtccgcttcgatgtctcaacgatggagaagaatgcttctaatctagtgaaggcagagtttagagtctttcgtttgcagaaccccaaagccagggtggctgagcagcggatcgaactgtaccaggtaacctttgtttgggctgcattagcaggtgaaatactttctaccggtaggattttcttctgcaatctgtgtgatctgagtcctgctctgtcattagtcttaccaaaacagctggtccctcgaggctcagcaaggaaggaatgtagacacaagacccaacactgcacaccctccctcggtgctgtaaggactggagcactcgccttgggagactttagtccacaggtcaggcctgtcatctgggaagccagaatgcacatgccagatgcccccctttccccagaagggcagctgagccgggatctcctcccttctcctttacctccctctcatcttctcctcggctccttcctctctgcccctgcctttcctcctcatctcctgtttacgataacctgtctcacctctcatgcgtgcttccttcccctctctgactagccgatccctcaatgcatctctagcccacctgtgtgcatgccgccctgacgtccccctctccccttgtcagtagagctgctgggcagctgtttggaacacagacaaagaatggggcccctgagatttcagacatcggactctgaaccaggtgactcaggtgaagtctgtggggctgaggcttgagtggcttaggagctatgagaaacgcagatgctcattccctacccactccattttaaggagctccctgggtaattggtctgcactaggaagctgctctttttgttgttgttgttgttttaagccttacatctggtgaggaagacagacgtgcaagcaagcacacaggttaaacgtcatcacgttacgtgaacagcacgtgcgggtgtagagggcagagcctgggaactcttagcaaggagccggtgctcaaaggaggcttccaaaaatgtctcaacaaaggtgaggggtcactgtgagcagaagcagcagtgtagtgacaggcattccaatttatttggtattatgtatttagttttgcagtgttggggatcaggctcagtgccttgtgtatgttgggcaagcactccaccactaagcgaaaccgtcagctcccacaacagcgtcatcttattccatgtactcaggagaaggtgttcctgcaaggaaggaccaggagaaggtgacctccagacagcgtggagacgtaatgtaactgagagacggaaggaaattaaggacagattctgccattagggtttagtggtatgattcgcaggtgatcttgcttgaagaaaagaaaacaattgatgaccatctgcagaaccctcattgttctgggttttaattcttgggaaaactggataatcaagatgaggatttttcatcatattctttacaaaaccaggaaattgctggacagggacatgctacatgtgagttcatgagaatatatgaacagtttttaagtagggttcaggaactagctctgtagtggtcatgtagaacgttttcttattgtctagaatggacccttcgttagaatgggtgttcaagtcttggcatgtgttccgagagcacactgtgggcagctcatgcctcatagacagtgttgagccaggccagcatcggagcggtgcatgtctgtgctcctgactgtgccgtggccacttcagcagaggtgtggcatgtgactgtgttacttgccctgcctccttctttctctatcttatagagaaaaacggctaaactgaatctctgagacagttttttattttgtttgtttttactttttattctttgggggcctaccacctagctcctaactaaatcacaaggaggcttattctttcatgaatgcctggccttagcttgccttgtttctaggcagtttttcttatcttaattatcctgtttatcctttgcctctaggcttttatctttctctatttctgtatacccttctttccttctttctcctcggctgctgtgtagctgggtggctgacccttggagtcttcctctcctcctctttctctagatctcctcctggatttctccttctatttattctctctgtatgccagcctgccttgctattggacatttatctctttattagatcaatcaggtgttttagataggcaaagtaacacagcttcataaacaaatgcaacataaaaggatgcaacgcatctttgcattattaaaaaactgttctatagcataaagaaataaaacacatctttaactaatattctacaacagagattaagtgacaggtaaactgtttgaaaaaattcagttgttcagagagcaaaccctaaagtttccagatttgattactatgtcttttgatattctgttccctagaggttgacgtggtgactctgtggcgactctgagtcagctgagagtgattcctggaagatacaataagatacattgggattcctcagggcactgatcagaaagggtgtgtgtgtgtaaatttgcatgtgtatccagtcatttccccagcctgtagtctcttgaagaattttgtaaaaggactacccatgattgccttctcggagactctgcttcttcctgggaagagaaagggcaattgcttctggacccaggtggtttccaaaagcctccgtgatggccgaagcttgatagcctagagcttgggactaggagcttcccagtctcacttgggaggtagctagttttaaataagctcattagctgcagattagtgaatcagattttacagcacttcctccccagagcaacgggctgaggcaccccattcctatagggtagagcttcagaggaaaaaccaccaaagtgccacctcctcacagggagttggtgtgaagtgatgaccagtgatgctgccaggtagccaaatgatacacccatgtgagccagcgggtggtggatgtgttgagataaactaaacacagtgggtttaagaggaatgtagattcttgatcatggacgtccaaagccctgtcaacattcatttttatagagaacaaagacacatagatttggtgcaccatgaacttaccatgagagcacccctctccagtgcactccgtcagaactttgacggtaggagaaccaaagctgccctccactttctcagacctccctccttctctgttcaacatagtttctaaaggaccaagctctcctagccataaatcatccatatccatttgattcttcactgcaagctgtcgaagtcattggactttcatatttgaggatttgtggagaaaaatgagtgaactattttagtagtgagaacaagtcatcccctacctaagcaggcagtctgcatagttcatctatgccacactctgaatgtgtgtgcatctctgagctttaggttgaaagtcagggtggatgttggatggcctagtccggagagagcctggtttcctaagatgtgaaaggaggggctcctagctactgtagagagaacagtgcagatggatttaatgaaaactgcttcatttccccccacctacccagtgtgtgtgtgtgtgtgtgtgtgtgtgtgtgtgtgtgagagagagagagagagagagagagagagagagacagagacagagacagagacagagagagacagagagagacagagagagacacagagagagacagacagagagacagagagagagacagacagagagacagagggagggagagagagagagctctcagctttcatttctcatattgcccaaggggatataaaataaaaaaagaggtcggccagaaaacctgtctgttaaattagacttgcaaaatatgctactgaaaaaaaaaaagttgtactgtgctcctgttgtgtggaattttacagcacacaatccccttaagactgacctcacttctggcgccacgttggagacatacacagcatagtaaccatttcaacccccctccaaaacaaataaacaaacaaaacagccatgatgtataaaaaatactctttacacaaggacatcagtatctcagggtttttcaaagtgatcaaatggcatgcctgcctcataaggaaaatgaattgttatcatttccatcaagtcatgatgctgctggatgccagctagcctcctgagtagatgggcctcaaagtcacacggacgccttctggactgaattacacacacacaaaaaaaaaaacctgcccatgcaataataaataataactagcagtgctattactccccttttcatattgtaatccaggaacattacaacagtattgataatcattgttaacacatacagtattcactgtgtgaataatgtgcgctctctctctctctctctgtgtgtgtgtgtgttgtgtgtgcctctctctctctctctctctctctctctctctctctctgtgtgtgtgtgcgtgtgtgtgtgtgtgtgcctctctctctctctctctctctctctctctctctctctctctctgtgtgtgtgtgtgtgtgtgtgtgtgaagaaccattaccccctttcaaacctgaggaaaggtaggtaatgccatctcctgcatggtataaacaacgacactggagcctggtgaacttcagagactgtgttggccaccgggtcagaagaggaccatgccgggattcccatccaggctgtctggctccaggagccatattctcaacctcttccccttattaacagaaagcacaaggctgtggagttgggaccatgtgtgctgaaagcagagctttgccctttgggatcccaaggaagtcctagggcaagaactatttgtgagttggtgcaatacaaacacaagcaccttccttggcagagatttggcaggtgcagggttcgtgcaaggaaaccttgaacaggctctatctccctagcaaccaccattgtaatttcccaagcctccattggaatgcttgtagaacagtatcttcactttacagatggttcctgcatgttataaaccaaaggttgagcactgtagtccctattgcagagtctggttcctggttgctcccccgtgagtgtgcctccggccttccttgaagaacattttctgcactgctcatgcgccatttagagaggaggagaggaggaacttcgtagacagtctgccctgagtttgcttttgcttcctacccttttccatattatcttttgggttgggcagatgccgcttctgagcctgtgcttcgtgaactggagggaaaggttctcttgagtgagtctctgaggtaacgggccttccaagtgtggcaaatcagaggcagtgcagaggtggaccactgtctggaccaccggccaccttggcggaactagcttgtgattagaaagtcactgccatgctgtccattatctctgcttggacttggtctgaactgtttcctgttcatttatgtcactttatggccgtgtgtttgaataactctctaaggacaatgagtgagctggggggctgtgattcgtcttgtctgtctttctgaagaactactagaaagtaatcaagtcaatgggacaaccctttacctcgtccccaacccctcactactttctgcctcatcatcagacatagagatttgctatttcggattgttttttttttttttttttccagacatggtttctctgtgtggctttggagcctatcctggccctcactctggagaccaggctggcctcgaactcacagagatccgcctgcctctgcctccgagtgctgggattaaaggcgtgagccaccaatgcccggcttggattggtttttaattttttaattttttgtgtatgagtgggtgccgacatgtgtgtatgtcaccacatatgtctggtgtccgcagaggccagatgaggacatcagagatcccagaagtggagttaaaaagtttgtgaacctcccaatatagatgttgtgaacagaacatgggtcccttgatcctaaccactgagatatctctccagccccctctgaactgattttcaataaagttctttttatcctgctgcaaatgtttggcgcctcaactcttccataacctccagagcccaaagtctcttccaagggagaacacatgcttactttgtggctctggcatttgggaaagttcaaaatgggttttttttcaaccgaacttctgttgcagaagtaggctcagatcacagttttgaggacacctctttaaggacagatctggatgtttgaaaggtgctattgattttttttttttaactgccacagttctggtggagagtttagacaatgaggtccgggttttcaattagatatgacttcaggcctctctggtctccctctgtgatcatacttgactgaaaagtgctgcttcctgccttagactactatgaagatcccatgtgctggtccttacccacaatctactcacaccctgctaagactttcgtctactcttttctctacccacaatgcacttctagagttaccaatgtgcctggctcccttcagtcccttaggtgtttgcccatctgtgacttgctggttactttgtgccctaccctgtctgtcacctcagggtcccctttctgactgagccacctctacgctcagctgtacttttttttctctttgatgctcttcatcaccaaatgcactttgtcttgtggtcactccatcttcatgttgtctttcctttcccccactactcttgcctgcataatgagtacttagtagctgctttcataacaaggtcattgttaaaatgagtgtgtgacatcataaaggttctttaagaaccattactcactcctttagctttggaaaatgtcctgcattggtttttaaagatctctctccaaatatctatggagaaagaaatgtacttacctacccattttctgttatttctttagcaattggcaaagtagataataacaacgtaggcttaaaaaaataagattctataacaagttaatggaattgatactcttgggtttaggaacggtttgtcccttaatggctctctcatttaaggcataatctccagcggaagggtgttgacaagtggcagggaattgaagaagtgaagcatagtgaggaattagtgccttgaaggaagacccttgacagtggttaatttccatgttgtagtggggatttggcctagtgaaactgagttactctttccctaaaagtggcttgtgataggtcaagtccaaagggtaccccaactcctcccaaaagagcagacccactgacttggtcaaaattgagtctaagttcaattcaagctggactacagaaggatttctggtagttagataaaaaacagcatttcccaggaatgagagaaagggattcccatctaacagagggggttacttcccttgcctctggaagaagggacatatgactctccattgtcatatacctgtggcacctattggcatttcaaggcccatactggcctccaggccccctcagtccctgtcatacctacttgttgtactttacaaagcacccacactagcttccgggccctcctcacctcccccaacccccatactgtgatagctcctgggctgttccagactcccccctttttttataagggcaagtccccatccccctgccataattcttgctattctttgctattctctccacttccctagccttggccgtgtccggtctgtttctctttttctaggctctggactcttctagatgcctctggacctcccctctctcttatcctcaatacatccctgccccccacccaatccatttcagtggtgtctgtacttcctcccttgcatacattgtgaagcaaggctaccctatgttggcctttctttgttccttcatgccactttggcacatactctcaccataatgtgatgtaactcacatgtcctcaccggatcccagacagatttgactgcccaagctttcacttttgccccccccccaaaaaaaaactatgagccagataaacctctttgctttacaaagaacacagcctctggtattttgtcactgtgacaggaagcaaactaagatgataacccctaagctctctatactttttaaaacaaacaaaaaccaggctgattcttgacttatttaagcttagtactgtatagccccaaccactaatgaagacgctccaggtcgagtgcaaaaacgtacataaattacaacacaggccatgcgtgctgtgggtatcaggaagtaggaagaagctgttagaaatgtgttttccaaacctgtctgtgtcagcgtcggaccagagaaataaaataggaagtcagataagaaaatcagaagagagccccaggagtccgggggccgatttcacacacactctttcacatctgtggtaaagcactaggctatgcggtgcagcctcacggaatgagccagttcagccaacaaaagggtactgtggacttgacccatcaagatgctatgtcgcacggtctgtctcctgagaatccagatctcctgggagaatcccctctgagttgtgtgatgtctgctatggcctcgaatgtccctctgagctgcagcattgacattttcaagtgacaaaggtctctttcatcccttagacttggagcagtgactttacttgtttatgcttatgtgcagtcacagttagcacaaaggtgcatgggtagaatgaacgaaaggaggggacaatagagaattataaggcgtttccatcagaggaggagtgtgtatatgtatggtggtgtctcagcacattgctggtgacatcagcgtaaaaaaaggattctgtgtgtccttctccttgattggaggttctcttggtcatgtatactgtaggtgtttatcaagtgctgagctctgtactataaagagaaccacagcagcacaggccatgtttctctgagctccagagagtctgttctcactttctcctttcttccaaagttgatgccttttgcaggctgcctcagcagcctccggagaagtccttgccaggcatacattacttgggacttcttggaagggtacaattacaaaggagccatggcaattacaggacacggtgttagcagaagtagtaagtagtaggtctgctaagccaccttagaaggttaataatggcagccttggtttgtcaggaacccctaaagtggcccagtgtgactaggaagagagtcacatttctgtctctggaaaagcaaacaatcatctctgctagctctgattctagaaggctccactttccatcacttggcagttctcttttctgctccccttaccccagttcatattctcctagtaacatgtaacacaccagaaagggtctcgtccagtatcctaccacagaccctagtgattccactctcagtggtatctgtaacctctgtggttggtctgcaggtgtgtataaaaccctaggtagttttcatttgtcactgtgaaagactgactattcagggacttacttatctctagagcaagtgtttctaggtttgttagtgataggaatttatacaggacagggctgtacaaggtgccaggggaaggttgtgtagggtaataaggaattgttagaaagaaccatgtttctctgaaggatttcacagtttggttacacatttcaaagtcctctccatcgaatagtgtgtgatactcactgttgcagtgtgtttgttcccgccttcccacgggaactgggaagcaccagttcctaacccaggatcctgtttccaagtaagttcactgcagggataattaggaaatatggggctatatggaggaggatgggcccctaatagttgtctgagtagtggccatgaaaaggtggcctcatgaaatctgagaggcaccagaagaattgcagcttgtgacattttagctaatgtataagttggttttgaaacctcacaggtctagagagtgagagcttgggtgtgtctgactcccaaagtccctaaagtcgtgacaacactgatggtcttcaagggcactttgcatggagaaccttaagggccacagaatgggggaataaatgacccttcacccaggtgagcgggacagttcccctaaacagaccttatagtcctctcagttgttgaaactctcctttctttgctgtagctggtataaagtgtgatttcagagacaaccagccaggaaggaagggactccatctagcaacaggttctggtttgggtgccatgatggttaactttgacaccaacatgataaagacattgagtaagcagtaacagatacaatgctaaaaggaagatacatatattgagtggcagacagcattcagagagaatccagcaagctaccaacctggataacaagtacagggctttggctcagtacccagtgctgggttgggcaaagggcattcacagcacagcaccttgaacttgacctttaggaaggtcaagttgaaggaaacctcctctcgtgacgggggctgtcatggagaagagagaatatcactttttactggagcaagcaaaatgcaatattggaaaccctcttccctccgcatccaggctcttcctcccaggctttgccaatgacatgtgtactccgggctttctgaatctctattcagagccatggtgtctactatgcagagttttagttggactcaaagcaaactggaaatatttgaagagttccattgactgcacagccacaagtctatgattaactgagcctgtttgatgggactgttcattaaggtagaatctgcagagtttgaaatgtctagaggtgacaggtggcctttcttgtaaagaggtgaggaaagacctcttcacaaagagagatgagcacgagcttggctgggctggagcagctggcttctgcagggcctttccagtcttgagctttaggattcagaagttcataacttggtgtcaagcacaatcaagagtctcagccaacagagtgtacacttaaataggtattcattaatgacgttggaaaccctaatcgtttaaatacacttaagacattcatgacagttggaaaactggaaacattaagactgtcacgggaagatggctgacaccagttaggccagtgcaggttttctttatctccccattcctttccattagaaggctggctgagttgactcttcggaagggtcattaatgtccagatacagatagtgatgtccagttcccacaaccttcttggaatgccatggtatgtcatggagagatgtcacccttggcactgagccaaatcccaagttgatttacagtactattcttttacagtgaagtttttttttttttctggctgcaatttttaactatacttttacttttttaaaaaatccctaaactattcagtaacacagtgactttcacctctagccattcctgagctggctgctttccaggggtggagggatgaatgaatccttttgtgtaggggttttgtaactcggtgaagaacttaaagccctgccaaaggtgagacgtgagtattttgcacacgttgtgtataacttgtctgtatcagtgatgtaacgaaggcagcgctgtgggtggcagctaagtcagagacagaggaatcttattttcaagctcttaggaacccctgcttctaattcagtgaggaactattgttggtcagctctataaaggaaaaaacaatagagcctgtgtgatgactcagtatgtaagggtacttgcatacctgaggacttgagtttgatccctaagactcacatggtaagagagacaggtttgtcagggttgtcctctgagctctatgtgttcactgtgtcactcatgagtgagcatgcatgctcatgcgcacacacacacacacacacacacacacacacatacacacacacacacagaggactataaaaatgagagaaactttaaattaccatattaacttgaaattaatatatgtgtgtacatgtatgtatgttcccacatattcacatgatgtgactattttttaatgagagtggaaggttgtttctttatatagctgtgctaattgctgatctgtgttatgttttttcataaatcatatcatcctttgccatctttaatcctcagctcttaattttctttgaaatagagagtttcaaggaagtcactgaaaaccaaagaacagaatccttgtagatttttagtatagttttctttttgttatttattttatagctaaatttagtaaaacttattatgataagatatatggaaaaattaaaattcaccttatggctgtgtctacttactgccgtaggcatcgtgctgtcagtgctgtgaggttagcatccaactgcccactgacagtattttcaactcttcccctttttatttaaactgaagttattgtgagtgtatgtgtctgtgaacatgtcagtatgcaagctcagacaagagcacaacttgtgggagtcagaactcccaccatgtaggttctgagggtcaaacttgggtcaccaaccatggcagaaattgcctttacccactgagctgtctatctcagcagcttgggatttggtggtggtattggtggtgttaatccttcagaacagaaactgcagccctatattacctgtcacctgtgtccccaaccctgcaacaactattctactttctttctttctaagttctcgcagtccagcttttcatgcgagtgagacagtttggctttgtgttggcttcctgtactgagtttcttgtcctcgagattgatgcatgttgaagcagatgtcagaaccgcccttccctccctggctgtacaccatagcttaccgtatgtttttatcacatttggctcatccatacatcttctcatgggcatttgggctttctccaccgtttggctctgtgaacaatgttaccgtgggcgtgggggtgatgatttgaatgaggatgacacccgtaggctgatatatttgaatgttcggttctcagttggtggactatttaggaaggattgggaggtgtggccttgttggaggaggtgtgtcagtggcggttgggcgtttcggtttcaaacacccatttcaggcccagtttctcaacttctctgtctcttgcctatgcatcgggatataagctctcagctggaactacggcatcatgctcgcctgccggctgatatcctacccaccatgatggtcatgggctagccctttgaaactgtaagcaagctcccaattaaatgctttctttcataagctgacttggccatggtgtttcttcatagcagaagaaactggatcacatggcaattatctttactctttggaggaacctgccatgctgttttcaaaaatacactttttccttatagcaagtcatcattgtgaagaccttctagaatgctttggtgttttgttgttgttgttgtttgttttcagaagtcctacctcccttttcttttggtcttgcgaatcatcagcttctaggcatttaattaacttgtataatctcaataccaagtctaggtgtcatcagtcagttgggaaacgtgcaattcaattcgcccggcaaggccagaagtggttagaaagtcatgttccagaagagccccagcatattgcaggttctggcctgctgaggatagaatctagaatggatgggcaccattggttaactgtgtcaagacagatagctgctcatcaaccaaattacctctgtcatgaaaaattgtagaaagaaacacagcaatccagaatgaaccagccactggtcacattccatgccctggcttagggacaagagaaaggcttaggtagcaaaagctaactgggctagtccttctttgtgtgacttgtgtgtggaggccagagctcaatgttggatgtgctctttgatcacattccactttttaaggggtctctctccattcagctaggccgactggctggtgaacttctgaaatccttctgtctctactcttgtactgtagttacagatgcatgcctccatgccggacttttcaggtaagcgctggggagctgaactcagagtcccatgtttgcatgacaggcactttactgctggaactacttccctagcacgtttgtgacttctggaatgtaagaaaagaccagtgggctgaggcatcatacaccttctcttagacttaatatgctgacgtatgggaataaacagggaattggaggaatggcacctatagcttttgaagatagctatgaagtgaagatttcattgtgaggtgtgattagaagttcttctggtgggggtaatcatgaatgctgtggagggacacttttgaaaaactccatcggttcttgttagccactcagtgatgagaggtttgggagtctgctcctctaaatgaggtctaaaggaactccgtttatttagcttagagagagaaaacaggcttggtggggggggggacttaatgagagtcttcgggagcctgaggactctcctctgagtgatgagaaacagctgtttcctgtttcttctaaggacaggggaagagtggagtcaatactgcaagtgagtttaaaagtccttgtccggggagttcaagacactgaagcagaaagaaaattatcccttctctgtctcagaattacagggcctcctgtttttcatggggttatcgacacgtggccttttcatgagttttaaacctgtacaaaaacagtcctgcaggcccttctcagtccatcggctgagcctcccagtgctctgtgactgaggaagccccaacccctaactctccaaaggagtcacaacagaaaagctggagtccctttgctatcagatcaggataatgtagatttaccgatacagcaggtaaagaaatcccatcaatgggctagtgaggtggctcagcagacaaaaatgactgccaccaagcctgctgacctgagttcagttcctgagacccacacaatggtggtgagaactgactcctgtgaactgtgctccgatggccacacctcccatgacacgagggcttccatacagactcacacatgtacagaaatgtaaggagaataaatgtttttctatcagtgtgccagtatgtgtttttcttccaattgattaatgaggtcatgatattcttgacttcaatgagactgaatattgtgtgtgtgtgtgtgtgtgtgtgtgtgtgtgtgtgtgtatgtgtgtgtagatagaatcatgtacatgtgtcatgtgtatcatagatagttgatatacatttaatttgacatgcaagatttatagtataaattgttcttagtaccagataatcatataaaatataatttatatgtaattatttcaacaatgaaaatgagtttttgttctgggtagtattcctatgtattaattatatgaagatgcataagctattaaagcacagaaaatatgcaaaattaccatataatcaggaaccatctaacagaagacatcctaggagaaattccagggaggaaggatgagtctgggcatgctctggccagtagggaaggggatgaaattccatctccactattgtttttatattcttatcccatattgggcaaattgtgccatttattctcagctgaataagttgtgtcttcttcgccaagtcagccttttctccctagagaactcaaggatgctttgttgtgtcagcctcagctaggtatgccttccgccagcatcaagagttattataatcttgtccaaagatatttgctgtgattattgaattcttcctaacctaggacaaggggttgtgaccccatggtcccactggcttgggggtggggtgggctttgaatcctcccggttttccatttgcttaatctactttacaggaatcctttggaggattaaattaaaccaaatagagtgcattaagccctgagtccattgtacccagccctgaagtcacattcgttggtttcctttaactggtgaaaagaatttctaacctgttacagggacataattacccctgcattcttccatctagtggggtttgtccatggggcaggcctggagagtaagtttgtctgaaggacacctgagcatgtaaattcagagtctcctttcttgtcttcccttcccttccccttgtcccctccctccctccctccctcccatcctccctccctccctccctccctccatccctccatccctcccttcttccattccttctctagtctagggatctaactcagggcctcttggatgctaggcaagcagtctcccactgagacacagccccagctgatgcttctttcttctccatagtaatttgttaactctgggggtgaatccactctaaccccaaatatcccaggaatcatttatgccacattatttgcagcaaactgtgaagacctgtatgtttgtgtgtgtgtgtgtgggggggtgcattaacaactagttgataatgtgttttggttttgcagtttaccagggaacaaatatatctactcaagagtcagttagtagctgttgaatcagtagagtgttactctttgaaatgttgtcaagttgatggcatgaccccatgatctggagaagctaatgaatttaccggagcaaccaaatccctaagtaggaaacaccttcaaaattagactgggaatcaggaagatctgtggcttgagccctcaagtaccactgaaaggccagccatgggctggacataggattcaacagagctccaggagatttagggtcacagattagttcataaaatgtgatcactttaaaagagacttgtagaaaccacctcagatgtacgcttcctgcgaacccccagagcattgggtcacaggtccttctctgtcttcctgacgtcttggtgcttaggcagatctgttttcagactctcactggcacactgtgctagaccgatcctgcccgaagtcctgagatggcaggatgcaggatttcaccaccaatcacaagtgacactgagagtcaaaaccctagccagaggtctatattttaacgtcagcagatttcggaaacaggagcaagccctttctctctctattggatttataatccaagggctgtgtggttttttgaactgttccctcatctcccagatccccaaattaaagaagtacagagatagaacaacaaagccacaaacctcatagcattaaaaaaaaattattatggcggattcttacagagcttctgtcagcaaagtaaaataatgactgtcgcttttctttcaacaccagactttatggttgctgtcatctttattagaaaacacagcagattttgtagttacccttttcagagcaagcagcctggtgttatgttgtcacatatgaaactgcacttttgggatgccgatgcgtgaatacagacttggagctaactgtcaatgactcggaatagcgtggttggtttgggtttggtcatcctgtcagcatccagctgagtggtttctcctgttcttccccccctctctagatcctcaaatcaaaagacttaacgtctccaacccagcgctacattgatagcaaggttgtgaaaacgagagccgagggcgaatggctttccttcgacgtgacggacgccgtgcacgagtggctccaccacaaaggtttcagagctcctcctttttctctccccagatgtggccccggcagcttgggaactgactgcagacatacacgcatgtacaaatgacttccttaacttaatgttttccagacaggaacctgggatttaagataagtctccactgcccctgctgcaccttcgtgccctctaacaattacatcatcccgaataagagtgaagagctcgaagccagatttgcaggtaatggaagcttcattctcactgtgagaatgtcttctgagggtcgatgtcagtttgcatgtgaaaatggcattgttcggtgatgggtgggaactttcattcatctggcgatgatctacttggtggaagagagaagaaagaagaaagtgtggctggagagatggagagatggctcagtgattaggagcaagtattgctcttgcaaagaatctgagttcagttcccagaatccacaactgcttataactcctgctccaggagaatctggcgacctcttctggcctccaagggcacctgcactcaaatgcacacacacacacatgtacataatttttttatttattttaatttcattttacattccaatcacagttctctctcccaccccacctcttgccccctgcctcactacaagcccaccccccatccactcctctcaaaaggtaagggctcccatggggagtcaacaaagcctggcccattaagttgaagcaggaccaagctccccacccccattaaagctgagtatagggaataggttcccacaagctagctcatgtaccaggtataggtcctggtcctactgccaggggcccctcagatacctcaagcttcacaactgtctcccacatgcagagggcctgcctagttcagtcccatggagtctccacagctgtcaatctagagttcatgagttcccaccagcttggttcagctgtctccatcatgatcttgacctcccttgctcatgtatccctactccctctcttcatggatcaccctgggaaggggaattagatgagagctcccgggtaagctgggagtaaggggagcaggaaagggcagtgatgggggaggagaacaagaggaaacaggatggtcgagttgggggaggggcagagagggagagcaagggaagagatgtctgatagagagagccattatggggttaggttgaaaccgggatattcccaggaatgcacaggggtgaccccagctaagactcctagcagtagtggagagggtgcctgaatataaccaggccttcccctataatcagattggtgaccaccccaactgtcatcacagagctttcatccagtaattgatggaaccagatccacagatccataaccaagcactaggccaagctctgggaatcctctcatatacataattttaaaataaaaatattttcttctaagcagaaaggattggaagaaaggaataaactccagattttcactgcttcacgcctagtggtgaaactggctaagtagccctgttaactatggggcagtgaagccctttattcctcacccaagcaagtcagcttcctatctgctgagatggttgaagtagataataggattcaagggaatccatttctaacctcagaagcaaaatttcaagcaccaagaagtacttttcaccaaagacgagaatggtctcctatctcagtctctgtacttaaccttccttctgggtgtcagggcgaaccaccattttctagcctgcacccactattgcaagtgtcttccctgtcagatttcagtggcagctaatacaaaggaggttctcatttcccctgctcaggttggagctgaattcatcaacgtacagagttaataaagatgccgagggttcaagtcacttgacttacgagacagcgaactgttgggtgaggaggtgaaagggaagtccaggccacacactgttgtggcatctgccagccttccctcataacctcacctgggacctcagtccacttttagaaatccccagcagcccatggtcatggaaaaacactccctgaaggggcagagatttattttggtctctaacctagcctcaattctctgagtggagattaaatgcttaaactggcactctcccgagcatgctttaggaggctcgagtttctaaatctcagatggaatcagaaaagtgttgaggatgccataaagtaaatgaaaaagctctttctgcacagcttcccaaaatagcattaggtaagggtgactcctgcttcccttgaacctagctcacggccatttagctgcacctcgggttatgctcattaggaaagtctctgggttgatggtctccggaaaagagggaaccagcaggcgacaaggcgtgctctatggctgtgtgttctgttgctgagagcttgaacacagccctcactgaggatggactaaaataaactgcctagattgcccttggaccataggtcaaagactccttctgtagtgacttttcccagtaatacccatgccttcaacacagaactgccgccagacaagaggcccatttagacgtgttttcattgtcccttgtgcgaggcccattgtggcatatctgcttctgtggggaatgatgatagccagtcgatgcagctgcagcagtcatcacgattgtttgtgactgtgtacacgtgggaaactatattatataaatattgctgcttatatttgacaaaggtaaagctaaatgtttattacccaaatgtgttttttcaaggtattgatagcacctccacatataccagtggcgatcagaaagctataaagtccatgaggaaaaaaaacagtgggaagacccctcatctcctgctaatgctgttgccctcctacagactggagtcacaacagtccaaccggcggaagaagcgcgccttggatgctgcctattgcttcaggtaaagaaatgaacataaaaacaaatgactgcatctgttcaccctttgctttctccttcacatattgacctgaatggaagtcattgctcaaggacaggtatagacagtaaagccattggatctcataacagcgctttctttagaaacagggactttctaaaaatattttattatttattaaaatataattatagtacatcacttcctaccaccaacccctcactttcatcctatgctctatcccaaattcatggcctctttttctttaattattattgttttacacacacacaaataaatgcatagatgcaacctactggctctatttagtgttgtttatttatatatgttttgagctgatccactttgtgttggataaccaattaggggtgcatctctggggaaggctaattcttcatctcttagccatcattaatgacctataggtctttatctgggagcagggctctgtgacatgtaccccatccttgctggcatgtcacaggtattgtttaggcagccatgtcattgaggtttcctgaagactctcaatagttcttccagtgcagtggtcctagcctctagcagtggaccaggtgtgaagaaagaaaacaggaccagagtgtttcctacaagtctctccaatgtgcttggatgctgataggttctgatagctcttggcccacaagtttccttgaggttttggctagatcagtaagatccatcgtttataggaattctttacctgaggtttgatctctttctgacgtataaaaataagatggcataagaaggctgatggtcataccttgggctgcaagaatttgtttgccacttttgtatgaatgcctgaatgggagaggcatgaacttctgggctccccgttgagggaggactgcttgtttggaagttgtttatcaggggcagggtccccttcatgagatgttcaccatgttataggtcagagacagaagaggatattttggtcaccagagacagtgattatgccaacaagacttgatatttcttgaactctgattcattccttgatctagtaacaagtggtcaagcataggatacattctcaaagggaaatgcccctgcaggctctctgaaggtatatgttgcattttatttattgtgtgcacaaaacagcagtagaggctggatggcagctgttcagcagggagacactgtccttttcaagtgtctccttgtttactcttagtacattgaagattaatattgatttcctaggttacagacaggaaggtcagggtatagaatgcacactgaaaagtagctcagagattcatttggtacctcactgttgacatggtgtgagatgacagagccatcaaggccagtgtcatggtgtttgctgtggcatggaatacgtgaatgactcatttttctgactcagggtgagatgcacgagaaatcaactcttcttcttttaacagaaatgtgcaggataattgctgcctccgccctctttacattgatttcaagagggatcttgggtggaaatggatccatgaacccaaagggtacaacgccaacttctgtgctggggcatgcccctatctatggagttcagacactcagcacaccaaggtgagtatctgaattgtttgtctttcctactcatgcctcagtcattcatgataatggcaataataataatgataatgataatgccaaactcaatagttgttgtgaaatacaacctatatatttaaggtgaatatctctaaaacttcacttgtttggtggttactttttttgatacagatctcattgtgtagccttggctggcctgaaactcaacgtgtagatcagactggctttgaacttggggcattccttctgctctgtctctcaagtgttgagattacaggcatgcactgccacatctttctctctaaatctttatgattaggacccaaagtgaacaaatggctcaatgttttatcaagtttcttccatgtggacagagggttaactcagcaagaagacccaagcatggatcccacgcatccccagcccagatgagcaccaactttctctgcgtactgatatattcatccatgagctctctctttgtggctcatggagtagaattttagagatgggaaggacttcagacatggtcttgttcaaacagaatttttctaaaaacaaagaaattagatttagattgtgtgggtgccttgcccaagatgaaagcaaaagcagcgacagcccagaggttggactgcagccctgtttgttttataatccggtccccattgctccatctttctgagcttaattcctaaaatgtggcagcaagtagaggtttctgctctgctctttatgcctctgtaaatctccttattaaagaggcattagaaacattgccttcactgcagggtaggaaaacgaatccgctgccagagagatcgcatttggctgaattcaagagttgggggttatcaattattttaggcaatgtatgttataaaaaatggctcttcctgcttatgaacaactatgtattagtggaatatgaggtctatttacttataaatgcctgtctggactggaattgaaatggacaaacatggcttcccctcctccagtcattttcccagtgtccctgtaggcttggcactcaggggtgaccacgtgcttggccatgtgagggaagctggctcatgcctgtccctttgtctgagctcttttggccagcctgcttcatctggactgcaacagcagtagctgtaactccgggagggccctgttgccaagtcagaacgtaattctcctccctgatacacagagggagtgtgtgaaggctggggccaggcttgtttttcaaggagaaggaagaataactgtcatggtcacaaatatgtggtttggacagttccccaagaagccagaggtagcctaataaagtagtcagtgttgctgtgctcaacaggtctcttgtcctcagttgaaaacatcccagggaatctcgaggaaaaggtcacttgtttgactaacacattaatggcatccttagaaatgtctctgtcatcactaggtaacctacacacttccatcaacaagagccacacactcctgtgatggagactgggataaaactgcagaactatgtacagcactttctcttctattgtaaggacttggtatttagttcttgaacttagtcatccccatttagcacaaggaatgttaatagaggcttagttactattattgtttcaagcaaaatagaagaaagtgaacgattggaaccatagattagctagttgggtggggtagtgcatgactgtaattccaaaattcaagtggctgaggcaggggaatgtgagtttaaggccaacctgggctatatagtgagttcaaggccagcctggtctgtcacagagtgtgggctaccaaggaagactttgtatcaaagtgaaatgaaacagagtccatgtggcttgcctgttgcttttttagttttttttttttacttctttttttagttagagaatactttattagtttttgtaatcaaacccacatagataagaccttacataattaatacagtgtgttactcctgtacaaatggaaaaaaattaagttcaacatttctagaccaatatggctgttagtttctgtacaatgccaactcaacaaggtaaactgggatacttttttccaaagttgacagcacagctaaagtttcgcctgttgctttttataattacattactctaattataagtcagggtaagtaaaagggtttttataaataaaactgcaagtgacacttcattggcctgtgaagacgtttaacaggaaggtatcgtggggcaggcaggcacctttctctacccaagtgtaggttacagttcttacaagagcttcaatgggatattttatccctctgtcattttgttccccagcatgtgagtcatatactgtgcagacaagagcttccctgagttacagacataaacaaagtgagcagcgtccctgagcccggtgacctcttaaccagtgtgggaatgtaaaataggtattcttgggaccttgcttccaaatgtatagagaaaggagacggaatagcaggaggcctgggttctttgtgcagcgaaggccagtagctttattgaaaaaaataggaaaatctgctaactgaacaatttggtataatctgactttttaatggaatcatttgtgtaatatgtataaaaagcacaaaaggtggcctgtgggaaaagtccaaattggtcattactaaggacacaagccaatccttccataatttagaggtaagaaaaaagtagttaagattgcctactcagtggcccagagctgaggagatgagtcagtgggtaaaaggctgtaagtacaagaacctggagttcatatccccatcaaccacataaaagcggtggtgatgtggtcgtgtactcttataacctcagagatgtgagggacagaggcaggaggattgctggagttcgctgaccaagccaaccttgccaaatcaatgagctacaggttcaatgagagatcagcctaatcggcagatatatagatgatagatagatagaagagtagaaagatagatggatgacagacagacagataatgaagtggagagagactgagcaagacacccactatcagtcactggcccctgcttgcaggtgcatacacatgcatacacatgcatacacatgcatacacatgcatacacatgcatacacatgcatacacatgcatacacatgcatgtaagtacaaagttcaagagcaaatgaaactaatcactcgctcgcttgtgtgtgtgtccttgtgttgtgccactcaggtcctcagtttgtacaataccataaatcctgaggcttctgcttccccttgctgtgtgtcccaagatctggagccactcaccatcctctactacattggcaacacacccaagatcgaacaactttccaacatgatcgtcaagtcttgtaaatgcagctaaggtcctcagcaaggccacggcacgaaaatcacggtgacaatgacacacaacagtgaatgacgacgatgatgtttgtgacacgagagaattttgattcatcagtgtttagaaaaattggagaaaaagcggtactagttgaaacattttgcgagcttgtgttctgtttgttaaaactggcatgcgagattacagcaacaacaacaaggacaaaagaaaacatgcaaggctttagtctgtatttcacctactttgtgagagacacaaaaagaaaacgtctttttttttttaaagaaaaaaataaacactggaagaatttgttagtgttaattatgtgaaagaaaaaaaaaaaaacgaaacaaaacaggaaaatccattcagtggagttgaacgtgttgtttccacccctcacctcaccctgcttctttctcccggttcctctgtattgctctgcagtgcacactttccctgtcccttcctctgagctgtcagtgggttatttattgtgtgttactatataatgaacttttcactgcccttggaaaacaaaacaggtgtataaagtggagaccaaatacttggccacaaactcatggatggctcaaggaatttgaactcaaatgagttgcaaaaacagaaggtcatacagggacgaagccccccgtgggtccttatatgaccaagcaagtctgcaaaaggatagaagccccaagaagacacactgtgcaccaactgcttgcagaagcttcctggacagccatacactgagatggcctgttaacaaagaaaacttggggtcagtgggaatctggaagattgctctttttttttttttttcatttcgtttaattgtaaatggttctttgccagtttaagcaagccagtgaaatgttgacctgttttgacgtgtattgtcagactttggaccgtgaagtgtctggagagctctgatacaggttttttcctttgtcttggtatatgtaatcacactgatactattaaaatagatgggtctagaagccagcataattaaaaacacatctgcagatctgtttttacaaactattaaatcaaaacattaactactttatgtgtattatgtagatccataccatatttttgatattctgtaataatgattatgattgaacttaaatttgactctcttttttaatgatcattcaagattgtatgttcatttcctttagctggccagtacctttgaataaagcccctagattttgacttgcactacaaattcattttttaaaataatatctcctctgcttgtctcttatgtattgtccatttaatgacctgggttcgtttccccctctttccttttcttttccagaagacaaaaaaacaaaaacaaaaaggtgtgtttgagttctacagtcttcccccatcttttctatgtcagtactaactagtcaggtgggatgacaaagttctcctggcaagatggagatgtgttcacacagatagttgaacacaagcgtagtttcagagagggtttaaaatctgaactcagaaccctggtaactgggcaaggaaaagtttctccagctttctttaattcatatatttgtggaattttgttgctgttaaaaagcagacagttaagaaaaaaaaaaaaccacctttttctttaatcagacatttgattccacgggtagaattgaaagacacacacttgggttggatttttcagaccgccgtttgtcatttcattcttttccccgaagttcaggtcttgaaagaaattctttgaaggctgaaaaggcacaagccaagttctcccttgtcaaaatctccctgctttcatctgcgtgagaatgctctacagctgaggttggctttggcttaaggaaataggttgtcctatttttcagaggtgggacctgacagtgggctttgtcacttagcttcaaaatacaaactaatccacaaaacaatggttatgatcttacccaaatatggaatttatggaatatttatggccaaagggcaatacattgaggtgtgaatacaaagagaatttctttgatgtggtacatctatctggagagttttcttcaaaattcatgaaaatgaggaaagggatttgcaaaccagaagacagacggcaagcgatagtgaatgtctcttgtgtcctgagcaacacaaacccagatgtgcctgtgtgctcattttctgtcctctttcactcttctgttatttctgtataaccccccatttctgcagatattttcctctcagataaaatgaccgtttttgctctgtatgatttgtctctccttctgaatgcactgactgttctttttaaaggtttcttgaacttctctctctctcttttaaagtctgtggggtctacagggctttatttcctattagtaaatattgccgtgggagggatagtaggagcggggaggggtgtgttagcatatgggtggggggggcagcagattgtatgtgttaagccacagtacaattttatggttggcatggtttttaaagaatggaatataagaatagctgttatgtgttttgatgaccaattatgctgtattttaacacaatgtatgtcttggtttttgtggtgctctagtggtaaataaattatttcagttatatgttgctgtgttcttcctgtcaaaggatcatgtttgagaccagaaaacacatgtgacatagtgagatgactgtaccactggaaaaggctgtctactatgcttttgtcacacagctgtttgctccggaaataccatgttgtggcttcagagccaggacagagctatcaaggactgaagaaaggcttcgctgtctttttatttctcatttattactatttggtaattgtttgggatttagtttccacccagcttgactgtctaccaggaaaaaaaaatgcagagatatttgggccatgattaggctttctggttctatgttctgccaatcccaaggccaaaagaaccggtctagacaggatcccctgtcgccccataacttggatagttactgagccagccagatataacaaaagccatgtgcacagttacttctgtctcagttttatccatagcactgtacacacacacacacacacacacacacacacacacacacacacacacacacacacacgtgctattccctcaaatctccttggttctcacctatggtaccctactcacgtgagttgccacccacttaatatagaactggtgataaattagatgagactctgtctgctgttcttgcttttccaatacaagaacttagttggtacccactgtgttgtccacatgtcacagaaacaagccatccatttgagcatggaggtagaatagaggatgggtcccttctctgccatctcatcttgtttgatcttaagtggattgaagccttccactctgacctcagtccagggttctgtgtagagtgagctagtcagatctgtcacccatctagctcgtgctagtcacagttaatggatgggtgagaatgagtagtacaggccaggcaatgaaaaatacccacccaggagtccccaaaactttagagattttcccatgcactccctttaccaactgtacctttcccctcttccctcacaccccaagacagggtttctctgtgtaacagccctggctgtcctggcgctcgctctatagaccaggctggcctcaaactcacagagatctgcctgcctctgcctcctgagtgctggggttaaaggcgtgtgccaccactgcccagctcctccctcttcctccatccctccctccctccctgtgatggtaaggggggatgaccgaatgcagggcattgtgttcactaatcaaatgtagtctggctgagccacaccccggtgtttcattaccttccagtgaagagaatacccgatttgcacatctgcctacttgttgtggacagccatgaggggaaaccctgaagtcctgagtgctgttttggctcatcaccagcatccatcttcatattcttatgcccatgctgtgttgggtcagggcagtccttgcagtaatgaactcttcatttccagactgtacctcgggcccacacatctccatcatgctactcaatgtgtaaacctctccagacccatgtctctcaaatggatcaagccatcagtcattcctgaggatatttcatagttctctagactagccttcgatgacaggacagagccaaattattcaaaaatacctagttgaatgaacttcattgcgtggcaacagtaactgtggcccactaccagatcctcttagctgatttttctctcacacttaaccttttacgtagatttttttaaagatttattttatttaaattacatatgttttgtcacacttgagagtcagaggcaggtgggtatctatgagttcaagggagcctgatctacaaagctacagagagaaaccctgtctccataaaacaaaaacaaacaaacaaaaaaattgtgtgtgtgtgtgtgtgtgtgtgtgtgtgtgtgtgtgtgtgtgtgtgtgtgtgtacatgtgagtaaaatgcttgcagaagccagaaaagggtgttggacttcctgagactgagtcccaagggaatccgggtcctctacaagggtagttagctttcttaaccactgagcagtctctccagcccctaactatattttatataacaccatgttataggagaataagtgggatctcacagaggactgaccgcttccccacatcgatacagtttgcaagtggaggtcttagagcagtgtaatccaatacatgagtcacatgtgtgcgtgggaaactgaaatatagccaatctgccttgagacaggtctaggtatagaatacccactaaaaattttaagacttaggcacaagcacatgcacaacttagactgtctcaatataatcatttttatacctactacatattgaaatattctggggtatgcttgtgttaaataaagcatgtggttaaaattaatttcaccttgttttcttttttatttaaattagaaacaagcttgtttttcatgtcagtcccagttccctctccctcccctcctcccctggcccctactgaccccctatcccatcccctttctgctccccagggagggcgaggccttccatgggggatctccaaatgctgtcttatcttttggagcagggcctagtgccccacccccacccccgtgtgtgtgtctaggccgagagagtatccctctatgtggattgtcacctggttttcttttaaactattttacatgattactaaaaagattattattattattattattattattatcattattatttcagtattttgagttgagttctattttatgagacagttctgaggcagattttgtttttctcttctccattttctctcttttgtgagatgggctctcactatgtatcacaggctgtctcatcctcccaatactgggattacaggtgtctccactagcacagctatagaatttgacagcccctctgcctggaaacaaagcaaagctattcctataaactgtgctattattatcaacctttgtttttgtaattaatgtgtgattgaacaatattagggcctaccgtgtgaaagtgcacttttggtcagtcaacctttaggggtcaacctaacaccaagtcctcaataacaaaggttggaaggcaaatatggacctttcagaagcctcagtattcaagttcctgtatgattggtggttgcctaccagcaatggagtggggaagctcagccccttcctgagcacactgaactgtagaaccaaatcctttcaacccataaaggctacattaatgttccagtggcaatctttcctaccctgcttaagagaaaaacaaaaacctgaattctcaccgtgaatgcttaagtcattggttttgagacaatgttgatttttcagcaaagaagatatgcagcatggctctagctattggacatttaagggatggagtcagatttctacctctaggatacttagcccaaaattaacacgtttcactcacaagtcaaagctagaggctgacaaggtgcacacagatatgaaaaaccaggacatggagcctgcaagatctttctggaaaactcatctttagcaactaattcctttgtttctatcaaaggttgtgactgtacttctagcagaattcagacttcattctttctttacttacctccaaagttgccagccccattctccattgctccccttggctctgcagtcccatcctgtgatgaaggaaaattagaccctgagtttactaacattccaggtcaaaggcaacagaggagacattattttcacaactcctttgaaatcgtatgtactagatgctataaaattgaagcaattgatataaatattagatcatggtatctatttatcatctgttatgtatctatcctctagcatctttgtaggtttattatcaatcattttttgtaaacatctatcacccatctccatcatgtagccatcatcttgctctatatatcatctatcattgatttgtcatctctattcatcatctatctaccatctaccatctctatcatccaccaaacttatctattatatctttcatctatctatctatctatctatctatctatctatctatcttctatcatcttacctttctaactttatttgagattgcaaagaaaagtctttctgtgaccttatctttaaaaggttattttttagccttgtctcctagtgagcctttatttccctgaaatgctttgttgttgatttttttttcagcaagtgctggctgtttggagaagagttgagtgtgttcctgtaattgggtagggacctaataaaaggaacagaatgtaccaagggatgctttgtgttgtgtggtcagaactagagaaatggtccacccaaagagagtagacataatggaacaaagaaaaaccagtggtcaagaaaaaggtcctatacagtctctcaggctttctccctcccagtcagattttctctgctgcagatgccaacaggtgtgtcacttggttaacatcctcaaactccagccagccttggtgagagggaccctctccataggctcatgctcccttctgaatcatatagcagctcctccatctcaggatgctgggagcagacaagctaagcagttatgcaatccaatgctgtcctaaaggcagtgtgaagtcatgtagcttggctccctctcaagtatgggtggaacatggatttcttcactcgaaacaaaattagacagtgcaggaaactgaacagagctttcaacccaatggcagtgctggaccaagttcccctttgccatgtgtgtgtctcccacttgttcatgggcaggcgtttgaaggaaccttggattacgtgtgtatgtgtgtgtgtgtgtgtgtgtgtgtgtgtgtgtgtgtgtgtgtgtgtgtgtgtgtgtgtgtgtatttaatgtccttaaaggtgcagcataagaaatacaacaaggatttaagaaattgataacaacttattcactccccttggggaacctagactaatgagacaaaggaagacctccaggcaggatgggagtggaagggcagaagagaagaagggaggtggaccaggaatggaggagagatactgagcacctactatgtgaccagcatctttcatgaagactgcaatgcctttgtgaaatgtggtgatatattcctgtaacctcagcactcagtagagtgatgcaggttgaattaccataggttcaagaccagcctggtacacatagtgagttccaagccagtctcaactgctaagtgacacactgtctcaaacagcaagcaagcaaaactgagacaaagtgtagaaagacagacagaacaaatgggctaatggggcttaatttcaaacatgagagccagcaaagagccctgctgtatcactgctttcaggagaagtgtgtaagagggctgcttgcagaagtgctgtggctcccaccctggcctgctgtcctgtgtagggaatgtcacatcctcccttcttgaagtgtcagaacagtgagcatgtctactcaatgctcccaattctggatacttgcttatttaacataggttcccagtcctggttttcttggggctagagagatagttccatggttaagaccactgactgctctgctcctccacaggatccagggtagaaccccagcacttacacagtggctcacaactatctgtaactctaattcaggggatctgacaccatcttctatccccacagccactgcaagcgtgtggcggacatacagtcatgcagagagaacatatacacatacaaataaataagttaaacatgttataatatgagacacctatatgcatacaaataaataagctaaatatattaaaatatgttagttaaattgaggggaggcacaggtggggctgtgacatcaccttgcaaacgacttctcagtggcttcttcagtaaagaaaagcattgggtgagatcatctgtgaagtccttcgtagccactgtggtttttctgactattaggttgccctttggtgtcattctctgattggaccaatgagcgggaagcatccatgcattggttcatttgcaaaaaaacgtagaattactgagtatatcagaaatcgggactctctcaaacttactctgtgtgagagatcttgttccttgtggtggttaattttgattattagtgggactagtttcagactcacctagggaattaataagccgcacctcttggatgtatcactgagggggtttcagggaagttcaaacttgggatgagatatctgaatataggggacaccgtcccatacataatgacccagttgacgtaaaaaaggaataaagagaaagcccacaacaggcacgtgagtgttctctctgtctccccttccctcccttccccccttccctcctcctgtgccccctcctctcacttccttccccttccctcttctcttctctccctcctcctacccgtctctccctgtctctcctctcctctccctccccctctctccctttccactctccctgtcttctgtcccctgcttctcttgcattcaaggaattggccactgtgatataggaaacccaagtcatgtgaagaaaccatgtatcatgactctagccagcacccccagccgaggtccaagttgacagtcacatcaaagcctgaataattagatggggaaagttttacatggcttccatcacagccattgacttcctcaaattgctaaaggacttcagacagaaattgctcagtcaatagcaagaactccaaaaaccaataatgattaaaagtaattgtcattgtaggtgggtttgcttttacaattttagttgctgaatgtctctctgtgtgtggaagtcaaaggacaacttgtggcacttggttcacttcttccagaatgtgggtccttgggattgaactcaggttatcagatttggtggcaagcaccttcacccactgagccacccctccagtcctgttgctgtctatataaagagtccatttcacaacaagtccatatttccagattctatgggctaggatggcagggtatacatttcaccctgtcaatgtaactcagagatgccgagcagagtgaccagctatttccagaaaaactcaaggaataatattctgcactaaaaataatgggtgttatgaacctcttgaggaccagatagttctgcgggcaataagtaaatatgagggccaattaggccacaatattaaccaacctccaaaaacatccacagctatgaaaaggggcaaaatcctgattgcctgctacagggttatggtcttacctgttgctgctgataccagaccagggttcaagataattggtagtcctcaggatggcttggaataacagccttgctaagataatttgggaaaacagaaagaattttcaataaagactacacacacacacacacacacacccctacacacctatattctgatgcagtccagtgccacacacatgttcacataaatgggaccatttcagtaagagatggattcccatgactactagtctttgaaagactcttaaaactctcaagaagagtacagatacccataatgcctcatggtagcagtcttatgttcatttatccaagaacccctatcaccttgactgcatgttttgtgtgtgtgtgtgtgtgtgtgagtgagtgtgtgtgtgagtgtgtgtgtgagtgtgtgtgtgagtgagtgtgtgtgtgtgtgagtgagtgtgtgtgtgtgagtgtgtgagtgtgtgtgtgtgtgtgtgtgagtgagtgtgtgtgtgtgagtgagtgtgtgtgtgtgtgagtgtgtgtgtgtgtgagtgtgtgtgtgtgtgtgtgtgtgtgtgtgtgtgtgtgtgtgtgtgtgtgtgtgtgtgtgtgtgtttacctattaaactttttattgattcttcgtggatttcacatagtgcatcctgatcccacttatctccctgtcctcttacctctgcccttgtgatcccctccaagcaaaacaagatttaaaagtatagccaacaaaacaaaataaaatatctcagtgaggaagctgcagtgtggcccagtgagtcacacagtataccccttagtccatacatctttacatgtaagtgttctttgttatggatctttggtctggatcattggcttcatgtttaaagtacgagatgcttgtatgtctgcctagctctccaaacgcaaggttgccgacctatgaaggacatcttttgcttcaatctcattgcatggtgggaacctggcccaatctcttgggaaaatgttagctattcatcacaagatgtttagaagctcacagactgttattttcccaaaaagatgtactctaggataaaacaatttcttcacatgatggcgcctgaaagagactggaatggaagtttgacaagcggggccgtctgtgattcatcatctcaactagatgtttcctgtggccttcattttctatgggaattttcatgctggcttctcttgaagagagaccttccttctctgggggcagttattaattgcccctccctagctgatggaaagttctggttttgtgattagttaactcaatctcatggtagaagccacttaaacttggcaaattttacctccaaaattaaacaggccatttactagcttcagatccccagataatattttgaatttttttgtttttgttttgtaacaacatgttggtgtttgaccttgaatgagggttgtttctgtggaaagaagaaagttatctgaatttatgacatatggaatgatctttgctctactttgctgtttgatccaaacatgtctttctatcggtgtctagtggtctggtgaagatagcagtagagtaaagtagcaaagaactgatctatccaaagagccctgcatttattaagagggtcacaatctaaccccaagaccttagatgaacatacaatgacgacttgactactagaatccaaggttaagttcacaaagcctggcacggaaaaggtgctcaatccatgccagtgtcttttcttttccttagatgctaatctcatggcatcgctcttagatggatcccatatcttctgcagcctgttacaaggagatcttctcagcagctgctacctggtgccgaggtggtacttgtcaaagctgttcttcaattaagagtctcacaggaagggatgacagacccttggactcctcatctgttctcacaactctcaattacccccttctcttggaaagctgctctggctaccacagtgtcagaatatgccagcaggcaattgccatcatctgatgtccatgggaggggccctatttttctaggaatagggtattgcagcagcatcctgaaaacagatgaaacccggtaccttaggtatgtactcattaggtcttgtccaggtcctcagtccttcctgaagcagagcacagttgcttcgaaggaatgcatgggtaaaacatttcccacatttatccctctgaaagactatgttatatatgacagcattcccattttgaggcatgacttgtgccaatccacacaggcaattagagctgacacattccatgggctctgggtcaagtgctcaaagaaacccacaaaggaaaaccttaccaaagaaaggaatccaccagaggcatggctagagagagaggctcatggtgacttgttttgctgggtttctctgctgtcttagttgtcccctttgcacccccaccccatgagtctgggtgtgaggtagtggcttgttgggtgctatgggttacattgtgattgacagtggtggggcaatatggtcatggcccattgaagctgcacctgcagagcatgggggcccaatcggaagaaataatcagttaaaaacttccatcgtggccaggaaagatggtgcacacctgtaatcctagcgcttggatgattgagacaggaggatcttaagtttgttagcttttaaagaaaccattcaaatttaaaagcaaatgatattttgtttagacagcatgaaagagagaggaggaatgtttgagaaaaatgtaaaatataacctttatatgctctcagtgctctcatatacataaggccatacaaaaattcctcttacagtcagctaataaagaaaatgtaatttttttctttaggaagagcaattggaggcttttctttttttaaaaaaaaaaaatgagactaggaaatgtggcccatagattatcttggcttcttcagggctgaattttaaagtctgccctgggcatgtcgtgagtccccatgagcaagtagaattgtcttgtccttcctcctcggttattactcagggcctgttctgttactccatttcactgcaaattggccttctggagtacagggatggcacagataataaaccaatgaaagaaaaagaaaactattctcaacgaattcagtgcatacctcacataaacaatcgcaactcccaaattagatgattctttttctaatttttttatttttatttttttatttagagaatactttattagtttttgtaatcaaacccatgtagataagaccttcatatttaatacagtgtgttacccctgtacaaatggaaaaaaattaagttcaacatttctagaccaatatggctgttagtttctgtacaatgccaactcagcacggtaaactgggatacttttttccaaagttgacagcacagctaaaatttccaaaaattcaaattatatatgtatatatatttatatttatataaaaagaccaataatagcagtatgttatgcatcaatagcagcaacagcatttccaggttctgcagtcatttgaacaaaattgtagagacatccagcactctccatataaaaaaaaacaaataaaagtaaaaaacaaaatcccagaaaacagcacagttctgttactcttgtggtacctggcaccattttttattaatttatttttttatatatttgaataacaaacaagattgaattacatgacaatcccagttcccttctccctcccttcctcctctaccacccccccactaaaaccctacctgtcatatgtcctttcttctaatctacacctgactcaacctttctgctccctcatgacctctgcatccttccttttcttcccttctcattctcgtagcttcctcccctcttcccatgttctcaatttgctcaggggatggtgaccctttccccttctccaggggacaaagtttgtctcttttagggacttctttgtttactagtatctctggcagtgtggattgtaggatggtaatcccttactctatgtctaaaatccacatatgagtgagtacatgtcatgtttgtctttttgtgattgggtcacctcgctcagaatggtttctttgaattccatccattttcctgcaccaaattagataattcttatgaaaaagttaggcttcagttttatttattcataaccttttttttaacttcttgccccataatttgactacacctattatttcccagactcatcttttagggagtaatacaattatgaaaatgaacaattctgggctgaagagattgctcattcagtattcactgtgctaatgtgggggtctgggttcagaccccccaaaactgatgtgaaaactaagtgaagctgtgtgtgcttgctcctagctgaatcaatgtcactcaggttcagggagagaacttgtctctaaatcaaaacaaaggaagtcaaacaaaaaaatctcaaaatataaaacaaagcaaagtccaaacaacaacaacaacaacaatgtagacagtaacaggggaaaacaactaaccttgatctctggcttctacatgtatgtgcacatacgtaggtgtacacttgtatactcactcacgttcatacacacaaacaccggtacagagttagcaattcttcggttgtgagatgtaaggcagcctctgtatatagaggggcaacattgagttttcttgttccagctgtaaaacaagaaaagaaaaaccaaaaccaaaccataccctggattatgtacagatgcctatgaaatagtactattccttgacgctaggggaaagagtctcaataaacagcagcctacacagaaaggcagtgctgggaccttgatttctttttctaggtatgtagccagacaggttctggcccccaaaccagaagatgctatccatatcctggctttggttgagccgattcaacagatgcctggcatgagctccacagatttcatccctcaaattctataggatgcccaccacatgtctatttcaaacattccagcatctatggagtgaatgaaatgaattttagatatggcacatcaaaataattatcactttaaaatagaatatacggaaatcttgataattgagaaatcttacattagtttccagagtcctgtctgtgagatctgctgtgtcctctacacactggagctcacgtgtgctgtgtccagtcaccatatgtggctggtggctaacggatcagctagagctccattgctacttctaacaaagagaaagagctaactagaaatgttggtgaggaatgtaaaatttctgagctggctatgctagttataggttttgacaacctgacacaaactgggggtcatctgagtagagggaaccacaattaaataattgcttctatcatattgctctgcaggcaagtctgtggagtgttttctttattaatgattgacgtgagtgggccagtcccactgtgggtgatgtcaccgctgggcagatagacggtcctgggttgtataagagcaaactgagcaaaccaaaggaagcaagccggtgaacagcactcttctggggcttctgtctcagttcctgcctccaggttcctgccttgagctccctgccttgactcccctcagaaataaactttgacccagaagtgaaagatgaaaggaacacttcccccccaagttgttttgggtcatggtgttactacaacaactgggaagcaaactgagacactgaggcaggaagagccctgtaaattcaatgtcagtctgaattagagtgttccaggctacttgtgtctacatagagggactctgtctcaaaccaaacaaagaagaatcatgagtcacacaggtcttaggagaagctaagaacacacaagaaagcaggcaatggtcccttgaacctgtgtcttcacacaggttctttaagtcagacaaaaaagtacgaaacatgacaagccacacctccatgtctgtgggaaagtagcagtcatgctcctgcatcaccatttctgtgtaatgtccatagagtagatgaattgctgatgcacaatagctcattttattcaaaagatagcaacctatgaccaataagcaatgcacagggtttggcaggattcaatatagcccaaaggtccttcctcagccattagggttctagcatttgtttgcagcatagacccttgaggggcttgaggactttcttaaggggaggactcccaggaggaaagtgtgtagaacttccttgggcaggtggccaacatggcagtttgaccacagctgtaggaatggtatcagatgaaagtgcacccagcatctttgggaataagatacagtccctagtttcctttcactaaggcctgcgcctagttctctttcttgtgatcccaagggggtttggtctcagttcgggtttctattgcttcaacaaaacaccatgaccaaaaagcaagctggggaggaaagggatgtttggcttacacctcaatatcactgctcatcactgaagggaggcgggacaggaactcaaacagggcaggatcctggagacagagctgatgcagaggccatggatgggtgctgcttactgacttgctttccctggcttgctcagcctgttttcttatagaacccaggaccatcagcccagggatggcaccacccaccatgggctgggccctctcccattgatcagtaattgagaaaatgccttagagctggatctcgtggaagcatttcctcaactgagtctccttcctctctgatgaatctagcttgtgtcaagtcgacacacaaaaccagccagcacagtcttgctctggaaactcttttagtttcagcccttcgtcctaaaagtggatcctcttcatgtcatccaggctatgactctcctcttcctctcctagaagtcccaaaaacacaacacaaaagggagagcaatttgcgatgccacagcagcaaaggtgaccttgtgtgcaaaaggtaaatgttcttccttgtcaagggggtgggggggagggttctaaaacagactgtcctgagagccaggggcagagctctgtggagtcacagcagtgtgcacacatagctatctggtgactcactaccaaatgcttcctaaaagagactccttaagttaccgtaacattttagaatggtatttatagtgccaatagaaaataggaggggccagggacttggagcctggcctctttctcctcacccttgctttcctgccagttaactctctctgtcagtttccaagccttctttatcccccaatggaaggcagaaactgcaggagatggtctcctttgtccaggggagcctgcaggtctccccttccttcccctccacctcctgctccctcagctggactccccaggctgctctgtatctcaccacagcttttctgtttattagcagctcagatgcagtgtcttgaaatgattgggcaagccagaagctattctggttttcttccactgtgaatgatatgtttcggtggctttctggcagttacctaggatatggccaaaggaggcagaggaccagttgagatccctgctcatctctggagaaggccttacttgccagtgggatgttatagctgagtgcttggttagccactcactgacccttcccagctgaattcacagtttcctcccagaacaccagggcttctacacacataccctgattttagctcctccctaggggggtcacacaaatttgtgtatctgtctattgctaggatgcagaatcctagagcaatgatcacatattagtctgtattgcacccagcaccattaaatgcttacaaacggtgcttaacataagtaggatgaatacacgtctaagcgaacatctattcactttttgttttattttattttatttttggtagggaaagagatataggatatgatgcgctttatataattcaacttttttgtttgttttcttgctgtgttttgttttgttttgagacagggtttttctgtgtaaacctgggtgtcttggaactcactttttgtattctgtgagtgttttgatgaaaaataaacctcaggtttgctgttaagcacctactgcatccatttgtctccactttaggttctttaacttccagagctgtatgacaagtgggcaatactatcactggctacatatgaaatggctgagtccaggggcatgaagggatctgctctaaaatctctctgattgtaattggtaaagctagcatctggtctctgggggtcttactgtttatgctatccttcagtttctccaaacttggttgttattgggataagaatgttcccatagtttgacttaaactaggacaatgtgcatttgttgattgttgtagtcagggtgtctcagggtagctctgactggttcagactccagcctcctgcaaccaccccctcagggccaagactgcagagttacaggtgtgcaccaccatgcccaccttagaaagcacatctttaaaagacagagtcacagaacatgtgagacatgaaaggagaaagtacatatgagggagctaaaggaaaagagactggtaggggatgaattaggaagaagtataatgacatttatgcatagaaatgccataccgaaacccgttaccttgtctgctaacttaaaataaatatacagaaagccagtatcgtaagaagaaagagaatattcccatttgaaagagaacactcgaagaattagtactcaaaataaatgaagagttccatgaagggttttgaaatttactgttattatggaaaatttcagatatacaccaaagtgctaagaagggtacggaagcctttctctgctgcaccctagactggcctagatctctactcatattctctttctttccactggattcttttgaaagaaattccagatttttttttaattgactaggatttttttcaatgaataggaacataactatgcttgaatgacttggataaaagcagcgagagaaactggtttcttccaggagtcagagccatccagcccctgttctttctagagtgggctgagaacccatgctgtctttagaacccattatctctttaggggcagccgatgtcccctcctagagttgtgtgggagacgtctgtggagtgctctgggtcagttcaagtgagggaagttttctagtgtcactacgtccttttccattattgatttcatatgtgtatcatgtaaggaattttcattcttttcaatggactgtctgaccaattttcagagactggacattgatgatggcatcaggagggatagcatctgccaattttcccattttggccttgagagctcaagacttgctaggagaaacagccaaatttgagggcttataggagagcttgtaatcaccctggcatgtttggagatttgtgagaaagcctcacaaagactgggcttttatcagaagaaaacatataattttactggtcattgtgggttgagttattaacgaaactagttatcagccaggtatgcttgtgcatgcctgtaatcctagcacttgggaggctgaggcaagaggatccaggctggagaagtaactagtcggtaaagtgcttaacatgcaaatttgaagaccaagtctggcatagtggtgtgagaaacacctctgcttttctgttgtagctgtttatcaaaggtagttaggctggcaaggactgatgcttcatcaccccccctccccccaccacacacactgctcacacatgcacacaccaatgctcaagctcctttttcctctttcctctaattagcaaattgaattggattatgaagtcaaccttccatcagttcgatgggatggggttgccatctatgtcaaagataaaagatggcatctggatgttgctagcctggtttgggttctggctcatccttttgacaaaaagaaaatgctttgccgagttccttttgctttgtttatgtgtttctttgtccagcactgtgatcatccttttcttctcatagttggatgcgtttgtaaggccagctctgaggaggggaacacaagatgatcccttgggctcactggccagccagcctagtctagtcagtgaactccaaatttagcgagagaccctgtgtccaaaatcaaactagatggctcctcaggagccatacacaaaaatgcaagcctttgtaagaacaagttagagtgttatctccactttcacttcacctccagcacacacacacacacacacacacacacacacacacacacacacacacagtctacatagttagactttatctcgaaaaagatccaaagattttgagcttgtgtgtccccatgagtgtgagcacgttaaagcggtgcaaagggtagagaggagccaggaaagcagtgactatggtgagaaccacttgggcgtctgtgcttttatatactttggaatctcaggtctaaaaataaccctcctttggaactggttgttgtttatctgtatcccgggttttcccattcttaaaaatactctgacaagcatatgaagaccgtgtaccaaaggtcagtgctccttcatcctgaagggagtggtgagtgaattccttatacatcaatctaagaatagttccggagcaagtcaactataggcctccattaaagtgcttcacatttttttaaaaaaaaaaaaacaaatgcctttgaaagaaaagcaaaaaaaaaaaaaatcatccttaatattgatcaataacttcaaagacatcatgcatcaaaatccttagttagcattgaccagtatcgtgacagaatctacacatgagaaaggttttgtctcacaatagagggaaggagaaatctcctgcgaatattttaccttgtggcatttcaaattgaagcctaccagagcactccggaaattacaaggaaatggacaccccttttaaaaacctgctttataactctggttttatttcctttattctcttttttaaacttgggaagattctggtatttcttcctgtacaagcaaagatagaaggccagtgtcatggcctgccagccacccagcagtcagaaccccctttctccttctctttccagcagggcatctggctcctccattttgtgaatcagtattgtttcttccctgctgctcctctggtgctggaggccagtcaaaaggaaggagggaaagaaggaaggacgggaggaagggaaggagggagggagggaggaagggagggagggaggagggagggagggagggagggagggagggagggagggaggagggaggaaacagattcaacaagaccggccaggttttgaagacagctgctgtgctgctttcagctcctgggatgcccttattcaggtgaccttgactgacacttcatgttccctctcagtacctgttggcctggagacttgaaaacaagcaaaaccaggaagcagcttgcatttgaacaactcgtagaggtcaagtagggttcttttgcctttctttgtttctaaaggatgagtttctgagtgactcactggactgcccatggcttcacagaaccattacagaaggaatctgagacagccatggagcctgcagaaattgtcctttcgtggatgctaatgaggtgctacaacgttagcctttgctagtgcctttattgtccctgcctccagagtcataagcagagtgacagtgtttgtaggtaacagtttctccctctaacctgacgtgctccactaggtacttgggggaatccataggctgtgagtggcactgatggggattttactgacacaaagccacgcagggaaaaaagccctctgggaagggattttatcaagaattgtgaaaacactgctgttttgaaatgtaccacctagcaatatattcttggcactctggttagctttccagctcataggcaaaaatctacaacactaaagaaggaactctggttccacgcctgtaattacattcactcctgtaggaccctcggttgtcttcaaagatatttacatgtctcctgcgataattagttctacgtagccatctgctccctttatttggaagaatttcaaagaatccacttttgtaaaccctcaactgtaaagatgggagcactttaatcacttccaagacatcagcccaagagcaaaactagacataattatgtgttgtgttacatctggccccaggcccgcctcttctctgagatttctccacacacaactcctcactgttatctgctcgtcactttcattctgcgttcagtattcccatccttggctgtctggcctctctcctgagcacagacattcatctctaaggctgagctgaaaaaaattcactcaggtgattatcatctttatcctgctgttctctaaggaacaatttttgttttcctagcttagcttggtggtgaggtgctgctaacatctcacagtgttcagggaaaatgtcttctcaagatcagattgacagtcctgtccatcatgccgggggggggggggggaccaaggtggaacattggaacatacgtgggttttctacatgtcacagcttctattgaactttttgtgacttattctgtttaccttctcctttaactcctccattaaaccacacactgtagggtattggtcttttgagtgtgtgtgtgtgtgtgtgtgtgtgtgtgtgtgtgtgtgtgtgtgtctcattccctcaactggatgtgagccttcagtattcgtccttcatttttatgtctttaattgtatccaaccttgtgctatgtacttaacacacactcacccaatgcattccactcagtaatgaatcgttcaccaaagtttgatgatgacatactagggtaatggccaagctttcctgagagcgttagagaaaaggtaaaaagatttctctaagaggcagagatctaacaggcataccgggagtgaacggcacgtctttcatttgatgtttattgaccacaatccagatctctttaaagcaaattttgtagcacagagaacaaggaatgtcagaactatgactgaggttcactcttgaagtgctgaaatgtcctgttctagaaaataaaggtgtctctggagcacggttccctgcgagagtttgggagtttcaccgtatcctgtcgtgactcggatgacaggattgtgaagacatttcccatctacgtgtttgagttccatgccagtggacaacgttcacacacgaatgactcagctgctcagctgggcagacagaaacagttccaacagtgcttggagagcagtgacttggacaagagcagtgagattcagggcattggacaatgttttgggttacaccctcaaattcccatgaacttactctgtgtcacctcaagattcagaccacatgtggggttactgataagatccacctgcccaacttaaaattctgagtgccaaactttggtgtgtgactggtataaaaggactattctctgagccaaacagccaccatctttcagagttcagctgtgtccacttgcaaaaggttgtcccagctgggcttgcggactgtttgcatggactggcatgtcaacctcatgctggcagggagcaccacagccctcagttcagtatccagcctctctccatgtttcttgtcgtactcacctggacactaattgcacatggcctccaggaaaggctggggcatgcaggctagcgaggggtagagtgtacagctttgagaaacagccatcgtcttgaaaagacttgaagtgtggcctttttgggggaaaggacccacaaccccaccccttatccttgctctgtaaggaagcccaataaattccctgattccctagagtgaactttgcaggaatcgatttgttgttgagaccttaggatgaggggttggcaccttttctgcatctcctccagggaagagattttagcgacacttggtgtagtttgcaggatacgatgaaggtgaaggtgagtatgggacgagcaatggacggtgtagaccctgacgggaggaatcagatgagcaaatgaaataaaatcgcccgagggcagcttttgcagagggcactgtggatgtgctggtctgtctctgtaaggagtcgcatatcaagagacgagatgtcacaggcacttttacaggcagcctggttgttgccataggagacagaagatcttaggggagaccagacataaacggagaattgcagcggctggcttgctcagtattggcctccaacttagcagggaaaatgaaaaaaaaaaaaaaaagataaggagaaatgggggcgttgacctgctcttttttattactagggacccaatggaggaagaaggcccggattatgccagtaacactgagctcctcctgggactcacaaacctagatccaatgggaggagtcaagtagagactaggaggggacccacctagaagtgaccacagataatcctaggtaatcctcgggtcccacctttaatgcagagaaagggaaggtctatgacccagcatactgatagagctctagcaactggctgttgctggagcctgggccagtaggagaatagccagccccagggctgctggagctaagggagactttcagtaagcagagggagccctggtttgtgaagctgtgggccatgggagaggatggaatcggcctaatgagccagcgctgaagaagctgagaaagggtaacacctccatcctcccctccttgggacaaaggctttgcaatccctggtggattagggacctgtgcttatctccaactgaggtctccatggatattaggaactagacaacaacaaaggaagggtaggccttgctaagagaagtggggatgcaggaaatggtgtttggtggccaatcagcaattcccgggactgtgtttacaggggtcctgagaaagaaatggattggagcaaggactggaagactggtttggagccttggtggcagtgtggagcctgtgacttgttgggacttatgtgaagattgcagaggcttaggccaaaattttgaccagtatcaaaacatcttgttgttgttgttgttgctgttgttgttgctgttgctgttgctgttgttgttgttgttgttgttgctgttgttgttgttgctgttgctgttgttgttgttgttgttgttgttgctgttgttgttgttgttgctgttgttgttgctgttgttgttgctgttgttgttgctgttgttgttgttgctgttgttgttgttgttgctgttgttgttgttgttgctgttgttgctgttgttgttgctgttgttgctgttgttgttgttgctgttgttgctgttgttgttgttgttgttgctgttgttgttgctgttgttgttgctgttgttgttgctgttgtttgttgctgttgttgttgctgttgttgttgctgttgttgttgttgttgctgttgttgttgctgttgttgttgttgctgttgttgctgttgctgttgttgttgttgttgctgttgttgttgctgttgttgttgttgttgctgttgttgttgttgttgttgttttagaaccataggtggatgcttacaatttccctgggaatgaagtttagcaactgtgactgatttgcataatactaaaatgggaactgcttggaaagagctaatatgttgactcatcttcatagtcctatttctccccaagcctttctctctagctttctgtgggtatgtgtgtgtgcatttgttcacagacagaggccagaagagggtgccagatttcctggaacaggagttacaggaggactcttgtgtgggaacttcactcaggtcctctgtaagagcagtacttgctcttaactgctaagtccagctcccacgttgcttaacattctaaaattcaagccctgcccaagattctggatttatcagattttttttccctcccaagtactttgaaagctccatttgcacttcagaaatagtgtgattggaaaacaacaacaatggtaacgacaacaaaacacaaaaaggaacttctttttaatagaagggaaaatgagaatgtaaattgcttttagagttttgttttcttctttaataaccctggcagcactgtagacatttcatcattacagcaaagtgtcacaactagccgggaccatttattaatgtctgctcagggacaggccaaaattagccaaagaggcctttttaaagaggctccatattttattgttttttttttttttcttcagagaacagccaggactaattagaagatgtttgcggctcgtagtagttagatctgagcatttgttagcaagctctcctatgtaaaacagagactaatcatgtcttaatttcccaccccacttgtctgtccaggcccaggccccattgccatctctgtgtataattgcaagaatttgttttgtttaatgtcattcccgaatagaggaagtggggatagaaatatctcgagtgctccacctaattccagtccgagtcatgaacactggagaaagcatggcttcttactaaaaagaaaactgtctagaacaataatatgcagtttataaattccatccaaccactggacaaataagctaccgaatcacacaagtcatgtcacaatgaggccacacaagaccagctgcttcacaaaggagcctgggagccagagaggagatctttgaagataaatattgccatatgtgaaaagaaaataaaaatcccaacaaaccttaattgcacagagcttcccccttcgaactcgattctctgtgggaaaggagggttttgcgtattgacccataactactgtaagtgtcctttacagtgtggatgatggaattaggaatctgattatggaccatggcagcgtagttacttgtgaaatgagcctccccctgtgacatcactccttgttttcctcacccctattgtcaatctccccatgtgtgacacacatagtcaattcttcattgatcagtggctttctccactttgtatttcagctgaagggaaatgtgacaggcaggctggcttcccagagctatggtgtctccagggagtagcactgcctatgttagacagattcctgaagtttgaaatagaacccaaagccaaatttaccttctcctgaaccctgaggctgggattatctttgcagttggtgttaatgacagttctgcagtgacccttgtcactgtcacctccttttgcttttgccttttttcgtttttatttgtcattttgttaagtcacagttgtacattcactacaacaaaaaccagaagtttttagaagttcaggcaatagtggtaaggatttgtagaccacagtcaccattgagaatacagagactggaagtcaccagaaagactagaaagaaggctctcagagccactgcacaagcaagagggaccaagtttgggtctccagcacccatgtaagaagccaaatgcaatggcatgaagtgggggagggtctgtggttctcaggccagccaggtttcagttctaacagaattagtgagagaccctgtttctcactatgtttagtgagagaccctgtctcagagaataaggtggagactgactgagggagacacttgatgttgacctctggtttccatgtgtgtgcatgtccatgtgcacatacacatgtacacaaacacaaacacacagagaaatagagatgggtagagggggagagagagattctacagtaaaggggtctgattctacttttaaaaatgggatctctgtcaatccaatactggagggaggactccttaggaggagtctttctttaattcatgatgggtgagatggtgagactcccttctaaacaatgcttttctgaggctataccacactgtttcctgcaatttggctcattttcttagtttatgggagaaatacttgcttctttcactttatgaatttaggaatcaactctgcctacatcaaggagtagttaagacgaggtatacctatggctgatagcatagtccaaaacacgatgcagaatctttccgggtggatggctgaataaaggttacatagttttgagtagctatcatcatttatttcacattttttctaaatcttaagaaaataaagaaccaacaagaggatgagctttgttttttacaatacgagtgcaccatggacagaggaaaaaaattgagaagtacctatttacttaaattacacacaatgtaaattacatgcaatctggggagagctttttaccagccacaggttattatctccagaagtgtttatcaggtttcccctccattgtcattttctcaggagttgcatgggtcacggttctttcatcaaacctgccttattcttgagattgagattgctgggtaatctaatgccatcagtgcttgtagggatgctgtgaatgactgtagcctgctgttttctctgttagaattcaatggcttctgcttgctctgagctctcacaccactgtggcaccatagttccagttatgggagaaagacacacgcatttggctcatcatactgtgcatggctagaggtactcggtgacaaaataaagtcatgtgaatgagaacaggctgtgtgggatagagtcctggaggcaaaagggagctgcatggggcatgagaagaatgcactgatgtttctggtccttcgtcctgcttcatagcctctcccctcttgacataaacatatggtcttattgcaggtgaggcttctctgttggttggggaaaggatccactggaaatagtctgtggatagctcttcatgtcttggtagcatttccccaaaccctagagtcttgatcaagggaaaatactcacgaatggctacaactccaaggggtgaacccagtcttcttctcttggaatgagagtgtggtagttcttaagctgcagtgggcaggttgtccagatgttcagggatgcagaaggaccccgattggaaaactgatgatggctaagtctggagaagcgagttctgaatggtcctgtctgaatgtgcaccaattgagctgcctcaggaaagaggatctaaggagcagggtacacaggatggtttgtcatatggactttagtcgtgttctctcttcaacttaacctgttcttggtcatgggtctctagtacgcatacatgaacaaggtggacacaaaagtaaaggtggatagaaaccatcaatgagctcaattacattaatctccactcagcaaggccagtttgagtttatctactctaaggtctcagtctgccaacaatactgagaaaccttgagcccccagtatggcctcattccctgtgtactagtaaatggttgcttggtggtgggttgactgtactagagccagtttgctccattctgagggatggcatcaacactgcagtcattggaatagacatcaattctagctgcagattttccctagctctctgtagtgcttcggttaatactgccatctctggggttagagattactatagtctctccacttgttacacagcaaaccactgtacagaaagttaattatagcagagggctgatgctcatggaattcactggtctttcttgtttccttatctctctgaagcacttgtccttacaattcaattcagtgagatggccttctgaagatttagatccagtgtcaactagatgcaagtagcttgggagaccaaagtagtacactttaagtcactgacttatgtatagtctcctttccaattggtggggttccctcttctcgaattcaagaggtacaaatggggtgtttggagggatgacagaagggcaaggtcccatgcaagcaggagactttgcattcagaatggcagcacccgtggtaaaggctgggtgtggtaggtcatactggtagtccctgcactaggagtcagactcagggggattcctgtggtttctggcctgccattctagccaactgatgagctccaggttctgagagagaccgtgtctcagaaaaataaggtggagagcaacatagaaagacccttaacaccaatctctggccttcatggagcacgcacaggcatgtgcagtgctctgaaacaaccctcagaggcctgtatgatgggtggacatgtaagcaccccacagaggaatggagttgagatggtgcaccagactgccccctgcaggcagtcatgggagcagcaggcccctcctctgcctgtgacaggctttagatcagcttctactcaggcaggacaggggcaaaaatctgaaactaacagtttcatgtcagaattgtctcaaatgtcatgtccttagtggtcatccaaaaaagagagcgatgctcagggtgtcccttgtgtagacttcatgacacacattgctgtgtgggcaagcagggaacagggatggggaaagtcttcaaatgaatacattcatttttccacgttatttcaaattcctgctttcttgcccaaagagctttgccaaagagaaactaggcaaatttggtggtgtaaataatagatgtgatagccaagatagcttttctcttcttctcatgggaagaggaaatctggggagatgagcgagtgatccatccctcatcatttccctgcccctcctccctgtgtaagctgccttagtcccgaagtaagggcgttggagaaacttgataaagttttccctcatgcttgaaatgtacttgccctgggtaacagaaacatgaaatcttgtgatgtagattgttctaccagatggcaatctatttgtgtagatcggtcctgtgcatgagtcatcccatgaagactgacctcggccactgtggacctgggttccacactgacactattactaaccaataagagcagtgttgattaatgctttcataatgaagccattacctccacgccaccttaaatgtggaatcattgtctctttcttattaacgcttgcctgctttgttagattactcctccttgttgacaacagcaggtacagagttgaactcagtagaagttggtagttgcacaatactacaccctcactaagtaatcccatctctgagcttaattgcctatttttgtgaaaatggttctcttccaggctctgtggttcattactggactgatggtgatggatttgagaagagtgataatccattcttgttttggggctattcagggaaaggaatgtatatagttgcaggaggaacttaatagctccacagtggtcctctgtaggttgggaagctgcagtcagctagggaactcagaacaagaatcagtctgagggtgagggcctaaaaggtccttgcagaccacagctgcaagtttgtgttcaaaggccgaaaatcctggagtctggtgtctgcctgaatcagcaggagaagaccacagccactggggaagaaaggtaagctagggtttgcttcccttttctactttcttgagtcatctggcctgctagcttattggatggagcttctctcaaaggaggtatcatccactctgttctctgagctgcctgtcagtcatctctggcaacaccctcatagacacactcagatgtgtgcgttcccacacatgggatgaacacttaaaaaatctagtggaaaattcaaattgactatctctcatcttttctttaaccactggataatttagccatgaaaaacagtttgtgtttattacaacttcaattatttggcagttgccaataaaccagggaggaaaggttatgccagcataaactcttcaaaatgagggatgaatgtaatcatcagcctgttcccatcttcgctcctcgcctcctgcccctccctcctgtatctccccctaatagcacctataactattcataaccacatgtgcattcacagaatggccactgccattgggctttttaacagtagatagccattttctaaagtcacattctgtcctctcatggacacagaatgtcacttttttggacggccaattcttgctcacattttgtagcaacccgacagtgtgtcccttccttagtccctttctcttccatcccagctgaggctgatgatgtctgtgtgtgaccctggcatggtctggagctgtcaaccagtgctctgacattccctctggcttttctttggcttctcttctcacaccacatctctccccagcctccttctgagaggaccagtcttcaccttctgttcccttcactggcaaattgaggtcagtccacttttccagcacattcccccattatctctgagagagaattgctgccacaagctctttctcggtttcggtgatttcccatccaacaccgttgcgatgaaatgctaagggttagtaactgtgcacggattcatttcttttcttgccctctacatgatcctggatttgtgactgaattgagatcagaaaacaaagacagcaagttcacagggatgtttccttataccgagttccacaggagtgacatgatgattaagaggaaaagtcttggtgagaagaggcattgagttacctatttctggcaggaattagagagtgggatgttacggaatttgtactgctaataatactcaggtctgattttaggtgactgtttccttagttgctatactgagtgcacacacagctgtgacacccacagaattctttaaagccgggggccactttgtgctctagcagaccatggagccctgtcctagccactcaccccttgcatcccccaccttctcccacccccactttcttctacctatgctctgtaggaaggcctcactttctcctcgcaggggccacaagtatttgacagttttgtgaggtctacgaaaacctcacctgagaagtagcagctcttcctgggaggagcagtgtccttgaagtcagcaccacacactagtaaagagaggaggctttggaatcagatcaaagcgggactgagttctaacctcagtgacaccaacctttgacaagtgacggaaacctcatgtggccttggattcctcatgcgagaaggcagaataatgtatcttgtacaattggctgtgagcactcaccgagagagtcatcaaaagtacctggcactcgaagatggaagctatttttatccaggatccaggaggcagagccttgctatgttctcccccgagctgccccccccatctgaaatggagatgcccttacgtcatccttcctgactagtcttaattactgtgtcctttgactctgacgggcccatcaccagcattctatcaagccacaagctgtcaaaacagtagctacagtaaggacatagatggtctctgcagaatgctgggaccctggaattttgtcagaattcctagatctttagtcaccaacatcactgcacagcagttcatttccagcccaagcattattttcaactgtaatcaccaccttcacccgctaagcactccatttccccaagagatgactaaactcgtatggtgatgtaaggtttctagacagtaaggggcaggggagaggtcagggctggagttaggaaaagtttcggggtgtcttagccagctatcgaatcctaagattaaagactgcgaacttggctaccagtgtccactccttgaagggtacatgacttctggagggggaagagagagttgtaatctgtggtgataactcctttgttgtctttgattgccttcaaagctactcctctctgaaaattatgacctgtgtggcatcctgtgcatacaggctgcctacctactcctgctgccccatagttttcatgcgtactgacttcagggtgattgcggtcatgtggttaaagggatgattttatctgtcattgttgagattttatgaacacagattatgtttatcccctttggttttccttaacatatagagttgagatgtctcttatttgagacactgaagtttttcttttccctattgaaattctaaacacacactctttgtatctctacatatctttctgcataaatctacatctataatgctgtaagaaataaagattaggacattctcttctggggtaacagtgctgaagggctaccccctcatttgaaatattcttgagcacagttaatacagtatctacatcagagcaaaaagatcagttaatctaagattctatattaagctgggttagatagcacaaacctgtaatcccagaactctagaggaggcagaaaatcaagagttcaaggatatcttcaactacattttgagtttgaagccagcctgggctcaaaaaccaaaccaaaacaaacaagcaaaaaacaaaacaaaacaaaacaaaaacaaaccaaaacaaacaagtaaaaagaaaacaaacaaaaacccaaaccaaaacaaaaaaaaccaaaacaaagattccatgttagtgttgatcaacacgatggtactgtcagaaaatgccagaaatgcttttgaaatgaatcacttccatttagctccttccataaatggtcttaacctaggcagaccccttaaaacaacagtagtgtagtccctaaacaggcgtttgcatctaacaatgaagacattattttggcaattcttttagctggagtctggggagatgaagccccgccctcagcccacagctaagctgccacagactgccagtgatcctcagccttccttactatgttgctactgaccaccagagagagaatgtgagctggaaacttagccaaaacttctagtggccatattaagaaagtaagataagggttgaggagagggctcagtagcaaggacaggagctccgacttccgataacccacataaatgccaggtgagagtgacatccctaactgtacctctagtcccacaaggaatcccagatcaagctggcttgggagactagccatactgttgaggtctgtgtttgattgagactgcctcagtgaacaaggtgggaggaggatggattcctcaagccagccttgggcctccacacgcacaggcaagtacatacatgtgtacccacacaaatacatgagtctagacacatacatacacacatgcataccacatagaaagatagacacatgaaaagtgaaaagaaaaaacagatcatttacacttgtttgccacgcactgttagtgattcttggactgaccagcatagttttatataggcttaaaaataggatttattccaagatcctctgacctaccagagaggcaacatgtttagacagttacagataccagaagtgtttccttgtgttgcactgaaacgacactttatgcccctttgctcttatctaacctctgtgagagttagtcttggctgtgaactccattggatctggattcagctaaaagacatatctcagggcaggactaggaggatattccaaaatggatgagtgcagaggggaaggccctcccctggagtaaatgtcaacctccagtagcagccagggcataaagaggctccaggacaaagctgctgcatttgcctaccctggtaggagggagtgtgagacagcagtcgcatttgtaatgatgggtttcatagtctttcattctctgcgttctgaccagttgtgggtctctgttttaatggccactgggcattcttttacttcgcaaacatttagaagctcttatctagccacattgattgtacaagtgaatgtgttttgctgtggcatttcccacacagagatccatgttaagaactcaccttcactcccaatggcattactcagtcttctgccccttcacgaatagcatacctcatattctcatgaattcttcccttgaaatatttatgctttacttttgactgtatttaaaaaaaaatagctccagaatactatattttgagcaatggcgcttcacccagctgcttgggccatgaattaagggacaaaatcccttttagaatagagttctctccactaccttgctgttatctgtgtctgaaattagcatagcaccaatattctgtttcattttgggataaatatgtcaatctaatgtggcaatctaatgtcctggcttgctgggactgtcctccttcaaggttctggttcctccagagtaggaaccatgtaggtcccatgtaggtcacagtcatgccaccaagttcaaagtcaccaaccaaggggtcactgcagctcacatttcttgcctactccacagggcatcatgactcaccttggtggttgtcctatccaaccaagttctcagttgtcagaacaggaagccagcttaacatttcttgcttaattcagtgagcccaaagtggacttggttcagagccacagttttttcttctcaagtttctgtcaccttacacactcttcatagttcctcagaataactgacactggttcctggttcacgtcacttgacttcctcatcccaaaggggccttgggtatgaagaggagcctaccctccacctagttcaatgctaatcttgtctgtcaatgtggtctctatgcaatgcatctgaagttacttcataaatcctctggaatagattaaatagcttaactttgttgtttaaaaaaatttagcttatggaaatagaatccagtgcacacttgtgtgtgtgtgtgtgtgtatgagagagagagagagagagagagagagagagagagagacagagacagacagagacagacagagagagagtgacagagaaagacagacagacagacatacaaagacagagagacagagaaatacagacagacagacagacagagaaagaaagacacacacacagagacagacagagagacagaaagacgtatacacagagacacagacagacatacagagagagacagagaaacagagagaaagacaaagagagggagagacagagacagagacagagactttgctgccaatataattttcagcaggcctctggccagatcctcttgtgataactatgatgccaatatatttacctccttgggaggcagagagaaaacaccttcctttctcctgtagaaagtgtcatttctaagggtcactttgttttctttttctcttctcctccctttctgattcactttctttaacagaatcacccattcttttgtcccctacctattattccagctgcttatttttatgttaaagggcaggcctcatcttttccaggaatacagtcagtgggtatgaaactctgttccctcacaagtgtagtaaggaaactgaatgccctcagtggaagaagccatttctccaggtcccttccagggtaggcctgatgtctgtctacagctgggtgatatggtcattgcactatgtttgaatttctactttgaggtgcaccttacccattgttttatgaactcctggataccaggggctaaattctcttaatccttgcatcctgggcatgccttgcttagcaggcggtccacagtgcagtctcctaagcgcacggaagagtgaagcgaatccctcagtgcagctgttccttggctgcgtcttctgcacagtgcagctctgtgagtcagctcattgcttggctggctgcaccaccggtgcagatcccctcttccacactaaatccaacggtgtctccagagctgccttcttttcttccccacgaaacacatcttctcttcaccatatgtttattccgagtgttcagctgaaggcttcagccctgtggtgacagagattttgttttcaataggaagtcctgtgctaaccctccgcttattcagccaccttcattccagtggcaaaacttctggcatgccagctacacaggtcattccgggagaaatccagattccatttagacacattctgaatggctttaaatattggactttctcagggttccttggagccggtgtttatcactagttgagtacagttacagagagatcaagggcttggttgattctgggccacagccattataatggcatagtttaagccaagtagtccccatgtcaactgtttcccaggcctttgactaaattttcctgttgggccacctcttccctggctgagttgggcccttctttcttctggatcagcagacctgctcgctcgcttgcttctcacagctcgtcttgctctctcacagtcgtcaccagacggcactgggtgcaggacctggcagttgacacttgtgtttggctcagagctggtttatgggtcacatgtcagcagaacttgaaatctcacgtccaacccaaaggaagatgatgccagtgctggggaatgtctttaaacacaaagtatgtcaactcagtgacccccccaagcttgccctgctctctcttcattgcacttattttaagatgtttgcaaagtgtcgtgtgtgtgtgtgtgtgtgtgtgtgtgtgtgtgtgtgtgtgtgtgtgaaatgagattttaggatcaaggtatggcaattttgtgagtgtgcactgaacaaggtccataaggaacataagcctgtgattatcttagctttgatcacactaattccactaattaaaaactccactaaggagagtcctggctaatcacatagaccttgtaaattacctaacaatgatagaaatatccaaagcatcagtgattaatgagcagatgtgaggagggaaggaaagcttatgggaaaaccatttctagtggtgatgtcagcaaggaacaatttgcagacataattactaaaaaattatcagagacttccttgtcaagtattttgtatgtttatagagctgttggtgactcactttagaagtctgggaggcttatttgatttggaatcagggttttattatagcttagttgttatgtaatagcttactcaggctgatgggtagatactcttccatgtcaacagaccttgtatgtgtgcaatgaaatcttctggtagttatttcaacaattcatatctggatgcttcccctgcatcttcatacctagaatatgctcatcatttgtataaagtagtatgagagacactgggaggctgactaccaggctactatgaaccctaatgatttagtgtactggtctagagtttctctgaaatataaagttggtaatagcatatggaatggctgtctcgaggaaactatgcacttaacacaagcatttctatatgtgtttctctgcacaataagctgggatcctccatggcttaactgtggtcaatactataattagtcagggtttacccacatattccaaattccactgcttaagagcaaagtcatctgggtacacccagtttggatgttggctgggaaactattgtttgatcaacacctctagttgctagcctgaagcatttcatttagagtttccaaaacactaatagcaaccagatagacatgtgtctctgatgcttttgcctccagaataactccaaaataaatgtacccagagaaatccatggctcccaaggaaaggttggacattatctttgctccaaaggagatgttctggagaaaagattcagaagataagcagggaagcccttggtaatccctccctggctcttctcttgtgctactgtaataataaaatttagcttatggaaaaggattaataggattaataataggttttttatctctataaatgtttatctgttaactcaaggaagcagaatttaaacacagagctgtataattcatctaaatatttgtctgtgtgggtttatatgccgatatgtggatctcatttaaacaccttaatggatttattttaccacttgataaccctttatgtctatgtgatacttattattatggagagaaataagggggatgtatagaataatggaatgaagacttaaaacagagatgaaatgtcatgggttttcccttgagataaatggaggttaataaaacagtttggaaagaaagctaggaaattcgtcaacactaacaacagaaactcctctcttgtaagaatggataatgaaaagtaatttatgacccagaaaagtcacagcacaaaaagcaatatttcattttggcaggtttagtttacaacaaacaaagcttttattttaactcttgaggggcacattgtcacgcaagcagtccccagagaaaggatgtttttgtcatcctgggaaattctttgaagcactagtgtagttctgtgacatctctgtgaccatccactctgtacaccacttcctgggccaggcggaaggacagatgtctggggatgcaacagtggtaggtgtgcatggtcactcagggtgatgggttggtcggtgagcagccactcaagcaccatgttttaggaggatgagagaactgaagtgctgtcaagagcagctgagaaaagacaagagctgggtgtgttggacagaccttcaatccatctctcctgaggctgatgcaggaggatcatgagttcaaggtcagcctgaaatatagactgaaactctatttcaaaacccccaatgccatgaaagcagccatgattgtgtgtatgatagcaactctgattgttgttttattggggtcggggcagttctattggtctatttgcttggatgttgatattctctttgttctctcctccttcctccccctccctcccttcctctgtccttccccctctttgataagccaaagagaattcattaacacccattttcatggaatctctgtttagaaagcataaaaagcaaaaaacaaaacaaaaactataaaataccaatgagtctttaccaaatccctgctacttggaaagcattttctcaaagtcagttagctactttgtcttttaaagagtcttaggacgttggtagggataatattcaacatgggatggctttctatctcaataaaaatatcataaagtgaacttattctgagtttaaaatgcacttaatcccaggattctgtaggatgaggtgggagggttgccacagatgcaaggccaggggatgctgtgtagaacactctgtttcaatgaaaacaaaaagaaagcatttactctatcttggcttccacgctactgagcaccacaggttctctggcatgtattaaatgtccaggagaacacgtatatgggtctgcagttgtgaaatgtaatgcagttgtaaaaatgaaatttagtgaatgttgtttactgtttgccctgtctctgactaaaggtaaagaaataggagtcatgaggggtggggtggtggtccccaaatgttactgctaatgcaggagtggggcttgactgtgttccctttggctttgatatattgcctctattgtcccaggaaacccccttattcgatcttttatcattaaaaataagattatgtattaaaaaaaaaaacaaaacaaaccgttctgaccagatttccattctcacttgctcctcgttggagaaaaattgaggcagtgcccagctaatgccctgtgcttttcctttagctgtgacccttttcgggagcccacacttttgcttgcaagcattagatttgaggcttgcatctgaaggtaggtcctgaattctccaggacatttcagtcttcatattccaccactaacagtttccttgttatacccgtgaaggcccggagtgtccttctaggtgtgaaaaagcatttccttgccagtaaatgactcgatcttaccgatatcaatcccagtaatcttagtcaacattcaaggaaaccaaagcttaacgaggccatggctctctggttcttcttttcctgctcctcctttccctcctctcccccagccccattttttttctatagcatctcactatgttgtccaaactggctttgaacttgggaccctttagtctctgtttcctgagtatttggattacaggtatgcaccaacaatagatgacaatatcatgaacttctttttttgtctgtttgtttatttttttcaagacagggtttctctgtgtagctttggagcctgtccaggtacttcctctgaagaccaggctggcctggaactcacagagatctgcctgcctctgcctcccgagtgctgggattacaggcgtgcaccaccactgctggctttatgatcattaatttctgaagtctccgctgccatcagcagcaagagaagaaacacctccaagaagatggcatggagtggaagccggagcacgtgagggatccctgggtcctgtcctgacgagggtcacgtgttagtgctgctcctgtagaagactagggaaatgggcgaacgattcagaaactgacttgatgcgtatcagacacatcccagtgcgattatgggttagggagctgctttcaccttgacccacgctttatcatcctgcagcctctcacatgagctcacaggtgtttagcctctactttcatttgccatttctagaagaagtggcctgtctagtccatatttctggatgcatgttggataaatcaatagtcagatgggagaatagaggctaaggagatagggtcaggggcacaagcagcaaaacaaaatgcagacatgaaaacatgcttctgatattgaatcataaacatttgaggtgtcattaggcacaatgaactaatcctggcttgaacaactggacttgggttacttagatattaaaaacaaaacaaaccaaaacaaaccaaggggaagatgcgtaaattacactgtaggagtgacaggaatacaagagagcacatctgagacagacatgatttgccaagtgtctgtcattcattcattcattcattcattcatttttttctttctcttatttgttcatataataattttattagtgtcatttgctaggctatgacaacacaatgattgtgtaaggaagtctggaaactactaccaatatattcagctatatctcctttcttactctaaatgtgtgtgttctatttcacgaaacaagatgaggaaaagatgaatgcaaaaatgttttaattaaagttggcactgatgtttttgtgatcttaattagttggaggattctgttcatttgtgattttgttcccagatctgggcatttgaaactgactctagactttcctcgtgaggcatgtgtgcatctcaggaacaagctgagttgtgagcatctctccatcaggtctcatgtcacaaaccctgctgcaatcccacaggagcttggcatatttagagttcctagttagtccttacatgggcacaagctgatttactctgtgcctgcattactctcagatcagttaagcaaacccatgaacacgacagcttggatatgagatgtcagtctgtgtggagtggtcggagaaggctaaatttgcccacaggaagcaatttgaaataatatccaaaacacagatagactttgagaggtttttgttctggctaaaattatctaacaatcagagaattggtaacccatgccctgtaggacttttatgctatttatttttattttatgtgtgtatacatgcacgtggaggccagagatcagccttggttgctctccatcttgtttttgacacagggtctctcattggcctatgcttcactgattcagctagactgattggtctgtaagctctgggaatttacctgttccctccttcccagagccgagaccaggatcaccttactatatggattgtggacttttagctcaagtctgtctcctacattgtgagtcctttaccaactgaacaaaattccagtctctttagcttcattctttgccatgactttggtagaaaaatcaaagaaacttggggaatttaaacttgagtgtttagtaaagaattctgggctggaatgactatcagagcacttatctggaactgcattaaaatttcaggcacccctgactacatacaactgctgtgttggcgttggaatgtactggtagctgtgttgtttccgtggtgcactcactggtctgttactgtactgacatgcttgtgcaggtgaaggtcgacattatatctcctcccttaagcatgatgactgttcccatacagctgagcatcagctttaaacataagactattccctgttccactttatcagtttttcctcttctccttgactgttccttttgatatgaaaacatttggttttatgcctttctgttcagaaaatcaaaacaaaaacaaagcaggaaacaaagccagccctaaaagcttccattgcacagtacaccctttctctccactctgttctatttccttgtaggaaatccctaaacaggttttgtttgttcctattttccctacacttgtcacagcctgcctttgctttcctgttttcttcccttgcagctgtctttccagttccattttcaccttctgaagacactcttgtgctagccaatgagagcacactcgccatcaggtctgctgggcattcttcgttaaagacatcagttgcagctggtttcactgatgaggcccttccttccctttccctggcttggctgtgtccatctcagtgctggagggctggaggctcttcagggttctgtcttcatacctcatgcacgctctaggtgacctggtcctcattcttcggtggcttcacctcaagcattctctgaccattgtccctctttgccacttagctggctttgctcttcttcatagtgttaggtctctcaaagaaacccaggacaaatctcactcagtacctgtggctcctcctagcacttcttacccagccccctaccctaaacttctccctcccaggacctaggcttcgacttcccttccctcagctagcttctccctcttatacaacctcagctattttggctattcagtctcttggcccgtggctcctctcttggtccacttggccttctttatcttctcttcctctctcactctccccattttctcttgctctttcctgataccctggcccccatgaccccattcagtctggacccttccagatgtcactggctattttttccctcacatctacaataaaccttctcctccgacatacccaggagtgtcatgtccttattttgtttttcattcatctggtgcggaaaccacaagattggcataagtgagttcccttccaagggacttggcctctccgaaccaagctgctgatttgactttcctaaggtatgtacagatcatttgtttcttctggctttgccactcagcacacttgactccaagttcttgtctgcctcatcagtacctttctaactatttggtctctccttgtctactacgtgagtgtctctctggctcctgaagcctactgtgccctccagagcccccaccacatgagtaactctctaccgactaagatacttactcatctgcctctctcagctccctcctgaaagcttcttcattgagctctcctgagcctgaggccttctctttgtatcccctcagagctacctgttctagctctccttgtgccctcctgggcttatacatggctttttcctttcatcacattagcatctgcctgctaagccctgcagctttctcaaacccttctgggcttctacaatatcgaaatcctttcaggcagaatcctactctttgctaccctgttcccccaaatccctcctgaaagtcctgcacttttcttaagccctctcgagcttctttccatctctcagccccctcttggagctcataggaaccctcctactggcagagttcatttcgcaaacttttcttccctagactcagagatactattaaaaccttaccatcttactgcacacaggttggtcttggaacagctcaaccagtggttgaagaagacacactcgattttcagactctctcatatgacaacttcagtcactgtatagacaaatgaccccaaatcatttatatctcaactttctctgctctatgcttccaaaggtctcttatctcaacttcccacttttaagaaaacatcttatctctataatttctctgctcccaacaacaacagccaaacaaacaaacaaacaaacaaaaaaaaacaaaaatctcttaagaccagtggttctcaacctgtaagtcacaacccatctgaaataaaccttctcctccaccaaacctagggatgccctgtcctcttctgtttttttttttttatttacataccacatgtcactgatagtcctttagagaccaagtctatatctaacacttaccactcactagaatgtggctttgagaacaacagcaactacctgatttcctgatggcactctttcatgcctaatggaagtgccaggaatggaacatgggcgctatctgtacttgctgaattgatcagtgactgtgtatgaatagaaactaagataaaccagccaacaagctgcttttcatggtaattctgtggtaagtgaacttccttttatttgcaattgacagctgaggtcagggatgggtcaggccaaatccagctgtttcctcttctctttctagatggtctgcatccacttttgtgttgcaatgacccagagaggagaactcaggtaaaaatggtgcccaccctgtctgtaaagatgaacacactgagacatcccagaagataagtgcagtgataattgctctattgcacaccttaaaaggcagaacaacatagagggtatgagagtgctctgcagccagctatctcaggttcaaatccaactgaggtgttggtttagtaacctggtttctctctgtatcggttttctcaaccgtgaaacagcagtggtgtgagttagtaagaatttaagtaaccaaaactgtccagaaactcagccatttatagaattgcatggcgggagggtaattgtattgggaaaacttgactgtgagcaatgtgagtgtcaggaacacgtgagcagtttatctgggagatatattagaattgatgaaatattgccctcctctcctgattcattctatagaatcttaagccaataggtatgaacagatacatttgccctctgtgccaggtgggaagagcagactgtgactttgcttaagtagcctttcaggatacatacagaaagcacatgatgggaatggcatctgttctctgatttgaaggactgcacagaaaacctcaggtgcagccagccactcatcctggcctctgtgtgggcaggcgtctgtgagggttttatctgaagctcctctctcagtgtgactttgcacatcagcacctggaataatgcctaagaattttcttcccgggtttgatctttttatttggaacctttgttagatattcccagtctgctcttaagtgtctgggtcaagcctttcctcttctgggatggcctccaatgagctttcgctgttctccaagtctgagacccactcccttggccctagcaaaaggtgctttcttaacagtttttaaaaacgatgcaaaagtccccaatgcttacagactatagctgtgtttagttgaagggaggttgaccttgctacacttggctgatagaaaagagtccagcacagcctatctgctgagcggttagcagctcagtggcccagctcgtgttaccatttccagggtctcttgcacccttttcttgtgtcctgtgcactagtccatcacaatcactccacagcaccccgtgttccctacattgggaaggccttccctcatctttgccttgttggttttcacacgttgtttagatatcggttcaataggtttcacagaagcatccagaacaggccagaatactagcaatcagcaccaaaacagagcctcccctcacctggctctgctgcccccccccacaccaccccccctcctggaaccatcactttatgtttaccacagggcactgaggtgcctgtttaatgtctgtgtctttactggagcagagtgggcactctcccagtgtctagagtttgaagaaatcaatagtgaaataatggatgaaggtaaaaagactgaaaaaaaagattataggcctgtgtaatgtataaatgcattcagtgacactttgctgtgtcccttcgatgtgcccagtgctgtgataggacagagaacaaggcagatgacccctgtgagattcagagagatctttctactctgaatctgttcagtgagcagctagatcctggacgatggagaacaggtgacgatttctgtctagactctgtcagccatcacagtaccactcagagtgattagtgacaacagctggagtgtacagagttgaagttttatgttgactgctcccacagtctcttcctatgtgtggtggtttgagcaaaggatgtccccataggctcatgaattccaacacctggtccccagttggtgtgctgtttgggaaagtcatggaacctttaagaggtggagcagtgctgaaggaagtacatcagtgggggcacagtgtgtttataacttcctgttctctctctctctctgcttcctgtgtgcatatggaaatgagatgagtctccgcctgattctcccaccatgcctgtcctgtccattgccatactgtcctatccctgatagattcttccctctggagccgagagccaaaataaaccctctcttctctgagttgtttttgatcatggtgttttaccacagtaacagggaagtaactaatacactatgaaaaaaggaaggtttgcaatcgtttgtatcctccttctggccacattggctgtaaatctgggggtgggcgttagtgatcctgtcaccactccccttatccctgctttgccagtccttcgcctctacacgccgtgattgaggagctctgtgtgtctaatgcagtctttcagttttgtgctatgcattactcccgtttctccctcttaagctaccatctcatttgaaacaccaccagtcatattgaaaactattagtttagttcatttgatttccacttctgcttttttgattacactttgtgtgttcatagacattgaagagaccagaccttcacctagccctctggcataacaggcagccgtaacaggctgcagaaaagatacagcaagatgtaggcctctgactcagcaacaaacatgtgctgagcttctgatcttgccccagtcactaggaagccagatatccttcatgtagccaggaaccaatcagaagttagctggcaggctccagccctgctttacagtatcagtggagtacagtgcatagcaaccgccttgggagggcctctaagcatagcaaccattcctgcaggtgcagttgaccaatcaactcaggacaggtcacccaagcccagaagtgcaccaatcctgagactgttgcagacccccagaaattccccttgctagatctaccccaataaattccctgcctcagggtccctctgggtcctcctcgctccacccactgtgtcagatgggcagaggacccgagttaatacagttaactcgttaattaattaattactcttgcttttgaatcagatcaggtctcttggtgattctgaggttcagaatttgtgtacaacaacatcacagaacttgaccatatctgctcctttgaggtactgcttcattgcagaaggatatctatcagtcgtgaaaaacaagcgtcctgaatcacagaacccaaattctaagagacctggggacacttttctaatctaatcttgcactgtggaaaagtgtgacctgagactgtggaaaagtctcctgagcctgggccaagctaaattgggtcactgtttgtcactccaggtgctcatcccatttgtttctgtggcctcctactgctccctgtaatccttaggaagtgacatttgtgtcccctcccccgcctcactggcagaatcaaccattgacagaagagaagagagagttgctgtgaaaactttccctcattattctgtgcatggaagccctttccctctcatttaagaggaaggagatttattgtaagttccttcttgttgcatttagaagtcatttctctgtgacccacaaccttagaggatccagtgagggtctgttccacaggtgatcgatgtaaatcaatttccatttatacatccctgtcctatgacaccatccgtttggagtcttgactccaaatccaggaggttgactcagggaggggaagattcttctcatccgagatcacccactaacttttacagcctatgcgcctgaatgtctctgggctgccaccctcagccctggctgcaggcatcaagagctcatttggttcctattcaagtatgtcctgtagcaatgtcaggggctcacttgcagtcgaccagctttctgagacaacacaaaagagaaccttcctgaatggtgagttgggaagccaggcaccttctcctcttgctgtcctcctgtcctgcactctgggaaaatgactctgggaaatgggggcgctggtctgtgctggctgccagcttcagacccctgatgagaacaatgcccagcaggttcccaatttccattcccctttccccatcctaaacaaaccagaagatggctgtgtctaagggcaaaatgacaagatatgggtgctttttaactcttatagtccgtgggccatcttccctggaaagcaaaactcgagaaggctattgtagcctattcaatgcactgaatgaaggcaattctgtgcaaaggatgcacaagtttatatttgtactgaattatttttactttagctcacactacccagatcagtcaatgaatgtgatcagaaatccagccaaagtggaagacaatcaggcaaagcagaaagcatatgatttggttggatttaaggttgaggcgagagccttgatccttttgatgttattaagtttgcttattgtagttgagagagcagccgtctgaccttcccttccctccccctctgttcccttcctttcattccctcctttcccttcccctccctcctctcctcttcctcttctcaccccctctccctgtctctctgtctctgtctcttttaaagacatattcttagctgactttgtatttgctgtgtaacctattgtggccctcccacgtctgcctcccaaattctgcgtttccaggagacctcaagcttccggtttctctcttgcgcagtctcctgaagtgccactgatcttggatgggaggacgagggacaaatctttcctaaagttctcccttttcatcagccccgtgtcctgcagaaaagcaatgatgccaccaatggcgcccacgacctactgatgtacagagctgactagagcagatggtgaatcagctgaagttgcgtctcgtgggaaaattcctgtataaaggcttttaagagtagttaaaaacagggctgggggatggctcaggggtaaatcacatgcagtataagcacggggacctgacctctgatccctcggtcccatgtaagacttgacagggcacacacctgtcaagacctcagagctactgtggagaaggaaggaagatggagacaggagagtccccagaagctcacaggctagctagcctggcagagatcgcagtgaacagtagatcctgtctcagacaaggtggaaggtgcagaccagaatctaaggtcgtcttctgactttacacgtgtgtcatggcagatacatccatattcccatacattagcatgcacttatactcatagtgaaggaaccagcttcccttctggcagccataatggccgaacacgtgcttttatgaccttgtcccagacactaaaatgtcagatgcctgtctcgtgacaaggagccaatcagaagttagctggtggtgctatgctttacgaccctgggtgtgctttatggacaagtgcacagcaatgatgtagagagcatagcaaccaccctgggagggcctatgggccataacaaccagttgaccaatcaacacagggcaagccctccaagcctggaggcacacaaatcgtgagcctgtgtgtacccctagacactccccttacgttgccctataaagatctgtacgcagcggctttgaaccgtcttttctagccatccgccatggtgggtgggtgaaagaccgagttaacatggggttagctcgttaaattacaataaagcctcgtgcagtttgcagcaagctctcgaatccgcctggtgattggggtgaccacgaacgtggcctgggaccctggatacttgagttttcgggggtctaacaatagtagaaaataaaagaacacttgccaaaaaaaaaaaaaaaaaaaaaaaaaaaaaaaaaaaaaaaaaagaccaggcagggctgtaatcccagcattagggaggtggaaaaaggccagactgggctatgggatcaaaccctgccgcaaaaacctgaaagggccaggagagtgatactcaaaaatatttcctatctcatattaagcattaatcatcttgaaaagaaaatgagagttgagtagtaaaagttaaatgtaattaggagacttgctagatatgtgaagaagccaaaggccacacatcacactataatgcagtaaatattttttgtagacattaaacaagagctgaccaataaagcccgatgtatgataaaataaaaggaaattcaagcaagatagtatccttaccatccaaaatggccaagtcataattggggttgaaaaggtattttaaaaaaatatgctataaattttctataattgtcccttttgctctttaatacttctacctcttcttttgggtgggggactttactgagatgataatctgatatgctttgggcaggacagagtgaaatggaacaaactgtgtttaaaagtgctgcaagatcctggagctttaaaagcatcctcgcctttctctctctattttaaatgagaaggaagtggagaggagatgacctcatccagtcctttgaaggactgatactcagtaaggaagaagtgctgggcagggtgagtcagtttcagccaacaccagggatgacttatacccagaatgttcaggcagccgaattccacgcatctctctgtaaccctgggaggccaagtctccttgacggcagctggaggctgaggcagctgagggactaatggcaaaatatatggtactacatcccattctcccaagcattgccgcttgcagacctgtaggtaattaatgctttccatgctgcacccacctcttgcgatgttagaagaagaagatgttggtgtgtatcttcattaggttgtctgatatgtggaacactgacgtttgatccaagaggaggaaagcagagatgttcgcactcacatgatacctacatatgtttatacatgtgaacatatacacgtatgtgtaaatagctcataaaccttacagaagcacaatgtgggcacaaatacattttggctcccccaaatcattactttgcaaaccaatttttcctttacaaaatgattcttaatagtcccacagatgaatgaactagtaagttcattgattccttataattgggcttgctgtgtagtattcattgtaataattatctgtaaacattttccattatgctagctatgtagctaagagttatatataaaatagttcatttgaacaagaggaatttgtttatttgccataagtgtttcctttcttttaaaagattttctcatacaggattgtggaaagcattttgagcctatcccgacatacctcgattccctcctctttctttgccctctcccagccattagttcccttcgttcctctagacagcttagctgtgctttcatgtcttctgcacatatatgatgctctgtatctttaaaggcttgagctgataaatgagagaaatgtgatctttgtctttctaaaactcccttagctctcatctaggtcttcgatggtcttccttcttcgaaggaagaaggcaccttcattgtgccacaattctcaaaaactgaggttttaaaagcttggcagtttccctaagtcacatattcattaagacgagtagctgaagtgtgctttccgcacaggctaaccctgtacccacctttccccgacagacgcaaaacagcatctgtgtaagtagtttgggacagttaatgcctgacccaaacaatgaattaacccttgctttgaatcaattgcccttgattttggcacattttcttttccatcattaggcattccactttttttttcaagattggaaaaatctggttttgaacaagtacatcgcattcttgctgtgtgaccctggggcagatggcagcaccgagcagagaaagaggccagtgtgcaaggatagaatgtagagaaactgccaatctagattcttatctgcacataaaaattacagcccccttgatgcagaatgaactctgcaggcaccagaggatttgcatatagaagaagaatctgttgactttgatgtggtgactcatcctttgcttgcagatctcatgggaaaaggccaattccgacagagatgctgcccgaggatgctagcttagcttttgctagcttagacaattctcctactctgatgtgatctgctgacacacccactcatacagaaacagccaccgatgagtgacagtgttgtaggaatgccccatacttaatcagcggaattgtctccttaggcacctgggcaaagcagagggagatggtaagggaaccctgagatcctactggagaaaggagtagtgtgagaaaatgtgagggcgactttctgcctagacagatattaaagattgttacagctccaggtggggcagggcatggggcaggccaaggtgggcgagcatcatgctgtctgtcatgggaggggaggaatggtgcagtgcaagggcccaggatctatgcttatctgttagctcaagttttgatctcaaggctgggaaagacatggccagaaataaatgtttagggcatgacattctttccgtgtgaggacactacattctttctctttagtgacaaatgactaaatagcgagctgggtcccatttatgatgtaagtccataaaaatgcaaccctgggcatctggtccagctcatggcaggaaagagttaaagctaagcattgttgcctcattctttttctttcttttcagtgagtggtagtttgggacaggaacttaaacttgctgcacttggggttggtgtgtgtgtgtggaggggtgcctcttctctctagtttttgcgggttggtgtgtgtgtgtgtgggggggtgcctcttctctctagttcttgctttcagccttctatgagagaggatagctcccctgcctttgtacttcccaggacttgaaaacactcaagaacataaacccacagacagaagtacaaaaagaaatggtggaaaatcattttcatttttagaaacttgagagggtgtgagtgtgtgggcgtgtctgggtgtttgaggtctgtataggaagtgtactggctgcagtaagcctccagccagctgaggacagcttccaataacaaacgctaacatttacacgaacctttgtggttgtgccttccatttcttcatataggaaacaagtcagatcttcaaatgctttagtgatgtgatcagtagacagtaatgggaaagaatttccccgaaacttgacttgcagtcaaaatcaggaaggaccatgggaaagaactgagtgatcccagctaaccaggatgcggcactttccggcctctgggtgtccaaacaagcattttgcattcaacgttaactttaatgaattttttcctttggagtggattggatggttacatatttggcaatcatcttgtggtctgttgcttacattacctgacccaaagtccattttcctcatgttggccgtgggaaagaaaaaaaaaaaaaaaaaaaacagtggaaactgtcaggacgtggagacgggtaccaagcatggtgcccagcttttgactgacccatttcaagcagggattgttctggattgtttgccagctgtctaagataaggggtataacaaatgaggagtgagatctacttggtggaaaagcccacaaaataggatgtttgtttcatctttttttcaatcttttctttgttaaattttttaaaaattgaaaatatatttttcatacaatatattctgatatattagttttcccacccccaactcctcccaaatcttccctcaactccccatctgcccaaatatatactctctcattagaatacaaagtcatctaagaaataattaaaataaaatagaagataagatgaaaacaaacaaaccagaataggacaaagtaaactcgtttccagaagaaaaagagcaatagaagaagcccaagaaacacatgcagatgcagagacacacatgtccacatgcacaggaatttcataaaaacacaattgcagaagccatcatatataagcaagagacctgtaaggaaaagcaaagcaagcaaacaaaagcaaaacaaaagcagacaacaaagccccagacgtacgcccaaagtactaggagataacagaccttcagaaatgcaacagcgcttgtttagtgttggctgtccactgctggcatggcatttgccctttactgtggtttatatttttaaaaaatccggaaataaaaaaggtcactcttctgccttcatctttttgatacctatcaaaaaccaattagagcagtggttctcaaccctcctaacgctgagaccctttaacacagttccccatgttgtggtgagcccacaaccataacattattttccttgctactctgtaactataattctgctactgttatgaattataaagatatttttgaagacagaggttatccaaggggtcacaagccacatatagagaacttctgaattatccaatcaactgtcctgtatcaaaaggtgtttttagaaggctcatagacaggtgttcaggtttgccatttaaagacctttgcacagaaatatcacccagtgccctgaaaagccttctggagcccccctgctatttgcagaagcttcaatacttggtgaagaggtcgtggccatctccaaggactgctttgaggagctggagggaagagaggagcatgggccctggaaagaaagtggtgtgggagggagcaaggtactggctcacatgagcaaggacctggggagtttctctgtgtggccagcccaagctgaattgtgtgcagagatgagtatgtgtggagcagcgcgcgtgcgtgtaactctgctatatatactggtgcctttccgagtatgtacgagcatatacgtacatatgtgagtgtgtgttgtattgcaatatgcttatgtgtgcgtgattacttgtgtatgcacaagtgtgaatgtatgtgaggcagaatctctgcttcagagatggagagattggaagagtgaagaagacaggactgaaagtcatctgctctaggcgagggtggagacatgccagctaccagcatctctgttatcaatgccgaaattttagataaaccattgtccaaactgcttcctaatactgtctcatagtagcaaccttaatgagatgtgtgatactgatgtccccacataattatagatggtaaaatggagacaatctccccaatccatcatatttaaataggaaacttgtgaataatgtctagattgtaagatgataaaagtcatgctacaattgtattcacatggcctatgacagtgaagatatgtacattttcagaaaaaattaaagttaatgacagttactaataaccatgctaacagatcagatggttaaagcctaaactacacaaccagccagaaagaaattattacttctaatctgtcaatggcaattacatcaaattgtacataaaagagacattggaaacttgtaatattagttcggcatgtgctggcctgcacattcaaactcagcagagtggggagtacctggggtggtagttcagagctcatgagccacaagaggacgctcctaagggcacagtccttttccatctcagcccatcatttctgccatgtggcattatattgtgtgcgtattccagatggggaaagaagggctgaggggaatacaaaggccaaatgagtttgacctttgtattaagaaaatagccctgtggctgtcgctgtaatttcattacctcattctgtgtaacaaagccacattgagcctagaaagactctggaaaggtgaatattacttctgtcttgactcagtctgggttcagtagtgaggactgagggaacgtggatggagcaggcactcagccacattcccttaacagcttcatggctcaaacccctgtttatatcacccacctaccaattcagtaaaacgacataggacaaaaccagtccagtcaagcatcttggagttaacaaagtctaaagagactgtcagttgcagaatttgactggatggccttttacctttttgtgttgctatgaacacagatgttcttttcagtagaggaagccaatttcccagttcctttaaactttgaagtactgctatatttcttttactgtatgtttttttttaaagtcttgatttttgacattaaatattttcatcaggttgtaatcaaaatttttatgaaatgtgctttggacttagaataagatttcaaagaagagccaagtagtaaagtgaaggtacaaaccatcgttgaactaatcagcacatattggctgcctccccattgttagagcagttacaaaccacactggtcaataaatgtcctgattggtaactgtgaccagcagggagttaatgtaatcttaatgctcatcattgttatttttctcctcctcaccatcatcatcaccatcaccaccatcatcaccatcatcaccatcatcatcaccaccatcatcatcaccaccaccttcatcatcaccaccttcaccatcaccaccttcatcatcatcaccaccatcaccatcatcaccatcatcaccatcatcaccaccttcatcaccatcatcatcaccatcaccatcatcaccatcaccatcaccatcatcaccatcatcatcatcaccatcatcaccaccatcaccatcaccatcatcaccatcatcaccttcatcatcaccaccatcatcatcaccatcatcatcatcaccatcatcatcaccatcaccttcatcatcaccatcatcatcatcaccatcctcatcaccatcatcatcaacatcatcatcaccatcatcatcatcaccatcctcatcaccatcatcatcaccagcatcaccaccatcaccatcatcaccatcctcatcaccaccatcaccatcatcatcaccagcatcaccaccatcaccatcatcaccatcctcatcaccaccatcaccatcatcaccatcaccatcaccatcaccagcaccaccaccatcatctattattggggaattgcagaatgcctgttttgaagttaacagctgggattatttagtgaagcaaatgactagttctgggcatgtcaagagtcttggaaaagaggaatcgacataagaacaccacaaagtctagggtaagagtcttccagacattcttccaaagtgctgccatgtttatccatggagacttttattcttttggcttttaggacactgatcttgcaccagagataagaatgcacaaaacagtatatagcttgctttaagacattgctaacgattaaatacttgtctctttggaatcagaatccattgttgaaacctgaccaccaatgtgatgccttgagaaggtggggctctagtgtgtgcctgacctctcttttatcaaagaggcctcagatgcctcaccccttccatcgagagtagatagaatgagcgagttctggctctgagccgtgaagcaggcctgcaccgtgcgccagattcattgctgcctgaattgtggatttcttggtctccaaagctatgagaattgagtttccattacattcagtttgtgctattttgttgcagcttctcaagctgatgaaaaccaggcatgcacagaaggccaattgtgtttgttgtagcccattcagaaactcacccattgtgaagagatacatccaaccatgatgactgtgggaaacaccctaaatatacaagtgcaattgtggccatttcaggagaacagaaacgccaaccacttttttggaagagttataacacaaatcacattcattcactcagcaggtgttcactgaggatctgtgactttccagactccatgtcacaccctatgaatatggttaataggttgaagacaaatccctgctttctggcagttctcactgaggaacaggaccagacaacctacgtaattcactcacatatactcacacacgttcctatgtggtgctagggagaagggagctgggaaagcagagggtattctgggtgggagcaggtgaagggctgcttcagatgggctcattaccaatgggacacagacaggaaagaactcagggaggggggcatttgagcaagaaagaagctccggtgttggcagggaagagactattgctgtctggccttttatgaagcggcacataaggagaaaaatggtaaaatatggtctctgcaagggtggctgcagtggtctggtgcaagatggtggtggctggggtcagagtgggagaggtgggggtgctggggcgatggctgtgtctatgtctgcatgctaaaattatgcactgtctcatgcttctaacatatatttctaggctgtgtgtgtgttgcttttctacaaagaggacattccttgtataatccaagaaaatgagtactgctgctgtctctgtcccgcagagtggactagttatagaagtaactacttagagaaaggtggcaaaccaagaatagactatagaacttaaacctgataagacctatttatgtttatgatatatatatatatatatataaaacatttaacttttgtaatactggagtgattctgtaggtaacagaaagtggggaaatgttggagatgggagaataaaatgtaccagcatacaggaaattttaaaatatgctggcaaagataaagatagcacttaagacaacatttaaagcttttaaaagctatatacatagaaataagccagtggtggcaatacttgtctgtggtctcaggacactggtggctatgataggaggaacaggagtttgaaaccagcccaggctaaatgagaaaattcgtcttcaaatgaatgaatgaatgaatgagcaaatgtgtgaatgaatgagtgagtgcataaataaacaaatttaattatttccgtcttctagcctccatggtacctgcacacatgggtgagcttgtgcacatacacacatactatgataaagttaaaaaaattatgtgtcaatatgaatagtgcatacaggtatatcttgaagccagaaaagggcatcagatgtcctggagctggagtgacaggcagttatgagtctgatgtgggtgctgggaactgagctttgttcctctgaaagaacagcaagcactcttagtcactgacacatcttttagcctcaaataataataaaataaatatttctttaaaaatatgcactaaagcgagaaaatttattttctaggcatctccaaattctggacgatagagaggaagatggataaatggcaggtgacagatgttagccagatgttgcttggctttgtgtgtccttgtcctacgggacaatgagaagccaatgaattatgtaggcaaggtgattgtgtgatcagtactttctctcaaaaggatccagtgctttgtttcaagcagacatcatactagaaagacaaagttgaagaaatcaactagagaactaattatatgtgcataagcacaaatattacaatacgtaagacaaggtaatatcgtattttctaccaaaaatgaacagcgtggcttccagaagtcacatgatgttgacgggaggaagccaggatgatcaacgggctcacgtatttcctaatgacctgatctacagggtaaagtcctcttctgtgtctcacatgtcttctgtccctatccatccttagctcacgttgtctcattaactactcattgttgatgacaccatggaaatatggtgagaaacgaggcttgcaaattctgaagggttttatgaagacaatgaaagtggcgtgggagacctgtcgcaccaagcacggtcaggactaggagtatctgagagacccactatagccacctctgtggtggttgatgaaccacagctttctccccactcagggtaaatcttaatccaccaatgcaatagcttcctcttaccacctaattatttcaggatttctagagttaagaatgtttaaacagaatttgagataaacataggaggagaggatcttacttcaagatgttcagatttttgagaattcttccttgatgctaaaaggaagagtcaccatgactaatttaactttacctactaaatccaggataggttcagtttattgtgtttagtgaagacaaatccattttagtggttaaaaactgatcacaggtctaacagttgtttgtctgttgctgtgataaaatatcatgacccccaaacaacttacagaaggtttatttgggcttacacttgcagagggagagtctatatggtgggggaggcatgatacaggcagcccgagaagaaggctgagacatgctgtcattaatcccaaacataaagtagagagagtgacctggaaatgaggtcaggttatgaactctcaaagctttcccctagtgacggacatacttcctccaacaaggctgcaccacctcccattaaacagtgccacgaacctcaccagatgtttgtagtatgtttttattactctgggcaagccagacttgagatatctatgcaattattggggacaaggcaggaggatgcatcccgtctgaagtagagcaaagacaagagcaaactacactgagggggatatccttccgtatgctgtccttccgtatgtttctcttattggttgatgaaaaatgctgttttggccaatggacaggcaggatgtagccaggcaggaagaataggtggggctaccagactaggagaaggctggaaagaggaatgcagagagtgagtcaccgagtagatgccatgtagccacagggaagggggggtaggacaccggggcattctctgctaagtcaagaccatgtggagacacatagattaatagaaatgggttaatagtttaaagagagctagccaataagaaggttgagccatcagccaaacagtttataattaatataagcctctgtgtgtttatttggggctaaatggttgtgagaccctgtgaaaaacttctgtctacaatacaccacttgcaattttaacttagaccagaaaagttggttgggaaaatcctggagacagaaccgaggtattaaagatgaagctaagctcaccagaaaggcagggaaggaaaacagcagacaaggttcaatgttgaccaggggccacctcaggctatactctggcttgctgattgtctatttctttaagccagaactcatcccattattataaatcatgaaagcaatgttctccagttctccatttagttggttgaagctgtgggctcttggaaacacacttgctaacacggctttgcagacagttcatgggttaaactctgatgtctgctgcctgtcctcagcatccacatttccttctccctacggaaagccacttgcttccaactcgcttatgatgccaattccaagactcttaacctcggcccctcagtgatccttgtggttttcctggtgccaatattcttggttagtggctgctcagtgaaatgtttgaggaacttttggcaaggaccaaatatcctgttacctgggtgagattaaactccaattaatctgggctccctattattagtgacaccctggtagctagggctgggaaaacccatcaatcctgagtgctgttgacacttcccccatctatccatttcctctcctcagagctatttcctcagtcgccctttgtctccattctttcaaccacaaagcaagatggtgagatcttgctttcaatgtgatggtggagtgtaggccctcccacttggctgaggtcctttctcctctagttcttcttacatgatggtaggacaagacgtcacctgcagcacatttccaccttggcatcattctatccagaattctcattgacttctgaatgtctgggcaagaaagataaaggtttcgattatagctttcaagccctgctcagattcactaaccacacccataccttctcaggaactgttcgtttatactgttttttttttttatttgtctttaagtcattcatcctttttgcctttaatgatctcaactgtattttcctttgtgcaatatttcatccttcaccctctgtggattttccaacttctttgtattttcctctgttagcatgctctggttttagtcacttcttggacaactttgctcattaagacattttcatctgtatttacatatttctgtcttttgtgcttttttgattgtttatttgctgttcttggcatcccgttcatttggggcttctcaaaagaagtgatgctttagtcacccccatttttcatgagttttgtatgcacagaagccactcaaccgatggctagttgacaaccagtgttctgaagaccaagtataacctttaaccctttctgcccatgccatccatgtccaagatgtagcattcatctactacacccactagtgcagagtgttctctgcccaaaccccatggctggaaccttttaatgtggagatctgtatctctgggcacaaatatggcttgattcatgacctaaagtacttcccacactgagcacgcaagcctttggtttgtagccaaaggcaattacatggagaatctggagttgtttgtgattctgtgtttcattctgtgtcctctacgattctctagcagagccactctgtttctcagggattagcatcaggccagctgttggctgccatagttgttcatcaatccattgatcttttgtacagtttgaagtggtgtttgaatatgcattttctctgcgcacctgaatgacaatggactgatatctgtgaaccatatggaatagccacatggtgctctgcatgcgcctgcctggactatacaatgaggcatggtcctgcatgctaatgggaactggtcagtgattgctgtctgtgtctagctacacaagaacggagaagattcttttgctttcctacaaagttgatgattgctgttagtaactcagacctcaggacctcgataactcattggactagtaagagctggaattaccaggattctggggttgaaactaagcagttcttagactacggcatgccttagaattacctgcagcgatctgtcataagaggttttgattccatcataggcctggagtttcatttctagtaagtttctaggtgctgttgttgctgctccaagggtcagcacttagataatcactctgtaaaactatactagaaacccagcttttcctttgggtgattgtcagaaaagataatgttgaactttgggcttctgaacatgatttatgtcaaaagatggagacttctcctccatccatctgtgcgactgggccagttaatctcccttatgaactccatgtgacttagaatcaccgtgtatgctggcttgagtgagaaatgccatcccatacgcttgggcatttgaacacttggttcccagttagtggccctgtttggggaggtggcacagttttgctgggggatttatgtcaatgtgggaaggccttgtgaattcatagcctcagtttacccatagttggctttttctgctttatgtttgcagctgaagatgttctctctctgtatcttgcccccacttttatgtctgctgtcatgcaaccctgcaataatggactttccgagttgtgaaactgtacatggaaggaacttgtggcagtttgaatgtaattggcccccataagctcataaggagtggcactattaggaggtgtgactttgatagagtaggagcggccttgttggaggaagtgtgtcattgtgagggtaggctttcaggtctcttttgctcaagctttgcttagcatggccctcagaccatttcctgttgcctgtgagtcaagatgtagtactctcaggctaggcttgtccacctgcccaggagatgggcacttcttctgcctattgcatatttcatttctaggatttgaagagagaaagataaaaggtattggaccacaactagaagccttagaagatcaagttatttaagcataccaggcctccattttgcagaaaacagcatactgaatcttcaccaagaaatgtataagaatgtatctaaaaaccaagtgttggtggtatatgcctttaatcccaggactcaggaggcagaggcaggcagatctttgtgagttcaaaggcagcctggtgtacagagtgaggtctaggacaggcttcaaagcaatacagagtaaccctgtctggaaaaaaaaaaacaaaaaaaaatgaaacaaaacaaaaacaatgtgtgtaaataaaaatcccctcttcagtatatatagggcaccccatatttcttatagaaagatgacaaggttcccattttgtaacttcttatctcttcggtgtagattctggtcagtacattcctggggtctccgtctctgcaaagataactggtttgtgcatctgacaagccaggggcatcttcacactgggatttgtaagattcacttagggctagatatggaatgttagggatattgctcagcgatagagcacttggctagcagacagcacagggctagcagataggccctgtctatctctagtatcaaaacagaacaaatacttgatataggaaagctggtggtttgaatcatctacacagacatgctggtcaagttgccatggtacaggaacttcgactctatggaactgtatgtctggtgcgtctgctaccctgtgcatatatctggtggagacagacactatgtggggaaacactagctttgccaacgtgtggttttgctctgctctattttcatggacaatctgattgataattggggatggaaaggctgttttctctacctagataatggcaggcattatcaagataagtaaaactgactaagagtaagtaaataataagtaaggaagtttaatcaaccatctggtcacatggagattagattagtcctgcattcaaagaatactgaagagattactatttctttattttaattttattatttttattgtatgtgcatggatgttttctgcatgtatgcctgtgcaccgtgtgtgtgcttggagcccatggaggccagaagacggcataggatattttggaactggagttagaggtgtttgtgaactctcatgtgtatgctgggaatggagccggaatactcttcaaaaacagttagtgctcttaaccactgagctgtccctctagccctgaaattcctgcttctcaatgttgatgccgtaccactgccagccagttcctttcacaggatatagcatttggttagtgtagaaatggtctttgaggacgtctagagcaaagaattcctttgtctttggcgtttgaacttcagaagagcaacagaaaacaccacaagaaagagaatggacccttttagtgctcctgggattcgacagggtggctccagagtgtctagggatttcaaacttgatgctaagaaagactactgagcaaggaaggaacaaacatcagcctggagataaggagggagcccaaaatagtaggaacaaaggagagctttcattatctgtggcgtctgcagcaacgacaagcagagagatgaagctgccaggcaagaggaccttgcacacaaggcagaataaaggaaccctaaatacccatcagctcagtttctaggaggagaaagtatgcaagagatacttccacctttcaaaggtggctgttcaaacacaagggaccccacttagccactgtttgttctttatctgggctaccaagagcccttagatttgttagtgggagctgaaaatcacggaggctggccttgtgttttcaagagactcccactactagcttggcggggtggtcacacactctcaaggtgcatttacttctgggacaggtgacttaggagctgtgttgcttcttttttcttatgatcaaagaccaagtttaacagtttccttggtgttatcatggaagcaggtcccaaaaggacagacagacgtagcagctgaaccatgtttgggatatctgaaccacccaggatatttactttagacagtaacattctctactgagaagaagttgcatgcttttgcagtaacacactgtgttctcttattggctctatctttatgggtacttggagagagcatcgtcaagtttgttagtttgttagtgacagaagtaagattccaacagagacccatctgtctacatcagatctcatgctacaagccgaatggaatgaactctgctatattctcaggaagatacaatgcggtagcaatttgggggttctggtttgaaacgagagaactgatgtaaaaagaaatgaatttgtttagctcacggtcagtcctgcaaacaccaggattaatactatgttgtgtgacattactaatgcctgcattctaagttttattatttttcagggggttattaagatgtaggcttgtgcagccagccaaagttcttgagaagaggcgggaaattagacatttgttgaagtttggtaatgaatcacactctgtctccttttgaattccaggccagatggacagtgggataagataaatgagcagtcagctccccccatacccccccccactggaaacagaaggttggaaaacatggctgagaggacaggctgcaggcagggtttcaagctgcttccccctgggtggagccaactccctcacccagctgcaggcagcaccatgaggctgcctggcggtgctcctgaccaagtttgctgagcacagggaagagctgatcacacatggaggtgactagaatctgtcagaaggggcagagctacggtgttgtgatccttcctccctccttgccagtctgctgcctcactcttcaacacttaggaaatgggtggaggacagaaaagccattttcctcctactcttgctttcttaggaccagaatggaatgcttctccctttcaaggatacagggaggtttagcatctgtttcccacaaaagtgagaaactacattctcagaactttctatttcagattggaaggggagatttaagatcatttctggttggtgaacttgtttcaggtggtgggtctgtggttagaggcgggtctgccacctgtgaaagcagagttgacgtgaacccatctgctcagagtgggacaactcagctctatcatcaagtgaaatactggttattttacttgtcaacacggcccaacctagaatggtcaagaaggagggaatctcagtaaaggagtgtctagattgggttggcttgcaggcagtctatgggagacagacttaagtaaaccaatgtgagaagacccagggcacttggataatatcatcccgtaggcagggagtctgaactctgtgccagtgtagagatcaagctgagagctgagtatctgtgcattcatctctctctgctcttgagtgtgcatgtggggtgagcaactattgccaattcccgatgccccgacttccctgtaatggtttataacctgggttataaactcagataaaccccttccttccctaagttgctttttgtcagggtgtttttatcttagcagcagaaatgaaaccgggacaagacggaagtcagttactaaatgggactgagaaggataggtttaaaaacaatcatgtttttgtttcagtaggcagaacaagggagaatcagtcagaatacttggttgagtagaggacatcaatttacatgaatatgggggatcatagaggagagagacatgtcaaaggagatggcatcccagcaacagaaaacactcacatcaaccacacctttgatatcagtagaaaccatggactaatttggttgaatgcatgatgagaccacatcagaacacatgtctccttgctgaggggtgaacacaggtgttcagaccttacaggatttaatgggtgagccagctgtgttgcttttatgttagcacgcaatatttaattgagggaagagatggaactcaggctcagtttggtggctttttaggtgagtgacagctaatgttgggattgcatggtctgttttccattccagagatgcatttacacagggatgcagttaaaagtgttgacttcagtgtattgtgaacacagtggtccatcccaaatttatctaatgagtttagccttttactgactaatgattttcctgatgatgcttcatggtcactaacacagctattactcttttttcaacatagcacacatgctagtcagcccgatcaacaaatgaccctttaaagaggcaaggatgcaagttccatgggtaacagttgccctcagtgagcctagagaagtctccctgttcatcccctttgccaatatttcttaagcacctacatctttttcagctctgggcacgatttcttccttcttgggatccaaaacttagcggggaagacaggccacaaaggaagttgttgccgccaagtgcaataacgctattttaggggacacacaggacagaacttgtggtggtgtagaaaaggagacacttgtgttcagaaaggtcggatcaagttttctcatgcttttagccgagacgtcacaggttcaaagactccatggggaaacgagcccttcactgagaggaaacttagccagggagataagacaggtgagcttggtgctcaatttagagaatgtcagctgttttgtttgcttgtttgctttgttttagtataagggacaagacttgggtagagaaagtgggcagcagaggtcagagtaatgaggtaggcatgggcttggaggaatggttgttttgttgcttcaaacacaaaatagcaataataatggccacctcaacatgcatatcctgagagtcaaagaagtgcacatggatgtggggagctcaggaaggcccgagggaagtgtaaggagtggccgaaaccctgcgtgaataagtgtcattcccaaggactgctgctgcagaccatgggaactggcaaagcatccctcaggccaaattcagtacaagtgtttaaagatgtctcatcagtgtttgcaaaatctagcaactgcaacttccttctagatgtctacagtgagagactgctcacctacaggttagctcacctaagaagagctaaccccttcccctgtgctgtatagaataaacatgctgaggtttcgggttgggtggctgcacagttggtgttgtgccatcaaagtgaacatgttccaactgaccctagcttttctatacttatgtctatccttttctcactccctcaggtttcctggaccaagccgtgaaggatgtgacacacacatacaaatcggtttctaatgacaaaatgatacacaaaggctaaccagccttgctggtgggttgactgcagaactgggtccactcttccaacagcaaaaatgattttgagcagaacttattgactaacattgcattatagcaagacttctgaactaagatacaaattgcaatgacatggcacatttaagtgtgtgtgtgtgtgtgtgtgtgtgtgtgtgtgtgtgtgtgtgtgtgtgttttctcttcctcataaattttcatatatgcctttgttaattcaacatctggcacaaatagttcattcactagtggaagctgttgtccagaaccctccaatcccatcatatgggcaatcactgcacatggagagggttataaaacctctctgggcagttgttttctgctctattaccataaattctcagccctctcagtggagagttgaatcaggcttaaatattttttaagcccatttcagtttgcactttctggttttgttcccaagaataataaatttgagcaatgcagtgtgagccattttcacactagccagccagtatttgtcctctgttggataaacccaaagcctggggttttgtgcccagcatgtggctcagatcactctataagcctatgattttttatttttatgttttcttcctctaatgagaaagaccccagtgcagtaagtgttcagcctgattaatggcgacactctaacttccagtggatttctgttatctaaagaaatgtaggtggaggaggtaaatagagtctcagacattctatgccccattttcaagctatgtagcttttgaggaaagaggatgaatgaagtctggagccagaggctggatgtgaagtgaccattagctcttcaagtctcttatggctcttaagaatacagaaagggaaattctggaaactatagcgctgtgttcagaatggatacttggtgtttatcaagacttatctgcactttagtttttggcactggctgggtttattgtttttggaatcactgatgtctttaactttgaagtatttcctttggtacctgtaggactgggggtggggggaggtgtctcagtgaggtgcctgagtcaatgtctgggttggaaggcaaactgtaaaggacagggtagccaactactttggaaagttgaagagagcgcacgagcaatgtgttttctgttgtagagaagtccagttagcctggaatgttccctgggagtctgtgtgtgtgtttgtgtatgtatgcatgctggcggttgggtaacaaatgagccatagcaaagagattaaatgagggctctggcctgaactgttagatcctttgatttcaaatatccagcgtttctttctttggcagggtacctggaaagctcagatgtccttggaagctggtcacactctccctttgtggttgttgtggtcagtgtccaagcagtcagctatagcttctgctttctgtggattgggcctgactgtatgccatggccctgggagcttggctggtccccaccatttctggggctctgagtgagcctcctgcatgtcaccctgtggtcttcactgtctatagtataaggtaaagagttggaggagctcttcatttccagaatggcctcactctcatttcttacagcgccccctagtgatgccacatttccgtttggttctctcttctgcttgtgcgtgagtgtgaacagcctaggggtgttagatttagtgagcaaaaagaaaacagaatatacagttaaatttgacttttatatcaacactttggaatgttttagcatatgtctccaatgttgcatggaacatacttagcccaacacagtttttcattgctgttatctaaaattcagtttaactgggtgccatgagtaatgctggcaaatttgtgtgtgagtttggagtccaaactagagtctttccacatcctggcctcttgtcatgcttagcatgttaagtggggtaacagattatatatggagaacaaagaacttgaaaaattgcttaggatcttcagaagggagcacacgttaggcagtgcagaggtgaaccagggaagagttaatacatatagaaggtatgttctctttacagctttctgcctaaacgatggctctccattattaaaacctagattactgggtgagtggaccttgaatttggcctacaaacagggttctactcacttcattttcatataattggttaatagaatttagtgatgcagacatctgaattttgaaaagtcaaagtacaccaatcagttgggccatgccaggttatttcttggaaaattcagtatgggatacttatttccaacttgccctttctgacataaaatataaggacagtatttttttttttcatggcagtgttgtcagttctgggggaaatggtttgatgattcctcagaaattaaatgtaaagccaccatataacagcaggacacttctgggtagagggccaaaggaacggagagccgggactcaagcaggccctttcacactcattttcatagcagtagtgttcacgacagccaagcatgaaccttctcgattgcccaccaacaggtcaaaagcccatcagcaggtgagtgactaacacaacgtagtatggacatatgactgaaagaggaagggacaatgaccacgcagcacaatgcctgtgaatcttgaaactatgtatagagtcacaaaagagtaaatattgtgagtctgcttccatgaggaacccaaactagctaaactcccagaagtagaaaggagagctgaggttgccgcaggcatggggcacaggtcaagctggtcactctttaatgacgagaagaagttctagagttttgttgtgtaatactgtgaaaattttaacaccatgggatggtgtgattaaccttggttaaggtggtaagttttaccgtaacttaagagcaaaccaaagaaaactctactttcttgatttttctctaaagctgtgcaaacatggtatcactttatccactataattgattggccaagcagacacctcaggtcactgggggtcactggggttagaaagtcatcgaccaggaagctttgcactcccttccagtggactctaacctagtcatggcctttgtggttggatttaacacgcctcagctctacttaactgcaaacatattgctttcataatttagttgcaaacaggagggaggttgtcctttatttacacataattttggaaaattagactaatacaggagacacatggatcagaatgcctgactgaagtggggagaacaaacattttaagataaaattaagaaaagctatacaaaaccacctggcccctgatccttgtacgttgcctggttttacttatatacattgttccaggaatacaaagcccctagaactttggcttctaaatggaggagataaaatctagaaaaccaagactatcacaggtccattaccactgctgtaggattgatctggcttgctaccaaatgcccacatagccaaagctgcttcctcagagtggtgtgattgggaggaggtgggaactgtaagaggaagaaccttgaagggtgatctgaggttttggaagtgttccctgcaaggtgggaaaaggctcttgacttctcttcccttctgtccaggcactgaggcaagtggcttcccctaccgtccactccatcagatgatggtgcctaagcacaagccaaaaggaaaatcctgaaagtgtgaccagaacaagtctttccttctactagataatctcatgtatttgttacagtaatgtaaagctaattcacataaccaccatgcaaggcagcgatgatagaatatttaaaagcaatgaataatttattataattttatagaccaatatgcaacttctttcaacattctctttcacgtgatgccagtgcctctccttcagtcaattcttctgctgattctcacccgatgtgtttctcttagagatcattttaattcacaggggggaaaaagccctcagtttttgacagtttatatatatatatatatatatatatatatatatatatatgaagaatgggtgatctcttggctccatcatcatgccaaaaagtggctctgcttttgcaaaatcttattgccaggaaaacaggccaggaatctccaaacagctgaggacttttgaagttttgtgtaaaatattttggggagaaatgttcaatacaacatctctcatgttaggtgccgagggtcggtggactcagccaaaacgtacaatacaatagaatcctaccatttccataattcattcattcactggggaaatatgagtcacacaattaaaatgccccgcagcatttggaatttgatctcagcaaatgactaatcaggtgcaccctgaagcaaagcaacatgcagggtttatttccccagcagtctctcttgggtttgaatcatccagagactttaaatgttctcacgagaagacctatgccatcggtccttaagtgccagacttaggcttaagtgctcacagctttctgggtcatttcatgttccttagatgggtaatgacccatcaagacccactccagtgctccctcatgtgaccccaaactgctcaaaagtacttcctatggacacaggaaatgcttcatctggatacaggaagtgcttcacccctggagacgcttatttttttccagctttcctacttaaaaaagttccactaaacaatactttatacaaacttttcatggaatgctcggcaaattctgcaaatgacagcaagactcaagaacagggcagaaggcaagcatacggacagcgggcctaagttacaccactgcatggctgattaacaaaggtgaccagagggacaccaactgacaggccacgttgcctaacagaaagaaacaccccactgtaatccagcggcaggaaataatgtccgcagaggaatgttttccatcttgttcccgcagtaataaaatctcatcacatgagttgtaatcagcctgtaacttcatccgtgtgatgctccggtctttgttctctttctttcactcggcctggttttgcctgggaagactttacagttccattgggagaggggggtcagaaaaaagatcttcttggtacaatttaagcttttagagagcatctatcccccttccccttgcctacaaccacagccaattgccgttcctcccctttgaaggaaaccctggctgtacctgctctttcatctcctgtgtggaaaatgtctatcagctggaaaacttacggctcttaattttgaaggattttcattgtaagctgttggaggcctgagctaaggtttcaggcaaaggtaacttcagtagctgagtctggtttcgacccccacctctgcctgcagagctggctttctgaatggataagctccttagctattgtaaatgcatgcttactggtatctgataaaggttcatggaaactgacacttgaagaaagaggaaagagaaaagaacgagagaaaaagaaagaagaaagaaagaaaaaaggaaaggaagaaagaaagggcaaaaggaaagagaagtcgaatccaacagcttacagagagattaggaaagttcactccagatggaaaattttatgggagctggagaaaaatgtataagtgaaatatcagtatcataaaataacaggaaatagtgtaatctacctgatggagaaaattgtcactttaaaaaatgtattctaatttctttcaaaattgttcttgtttttgagccaataaactgcagctgagctgaccacgggctttccctttgccagactcatatttgccagcagaacctctctctctctctctctctctctctctctctctctctctctctctctgtgtgtgtgtgtgtgtgtgtgtgtgtgtgtgtttacaactgaaactttctcattccccttgtctattaattaaaacaaaagccacccaggggtaggcagaaatcatgctacaaggagacaaaattgctaataatctgggaaaattatgattcgaaagttttgagaaaagtcagagttgagtgtgggagcaatggatgcagagcaaatttggggtacaggatgaagtccagtgttttcttttagtaatgacagtaatacaatttagttttagtgtgtgcatggtagaggagaatccgcagatggctgcccaaggcgctccctgtgggcaaatatgacattgatgcctctttttcttcatctcttctttttttcctccccttcatcttcccaagttggatttcatgacttagattcctgaacatatgaagaaaggcattctcagtggctcatttagggtattactagcattaattccctgtatctatacaaattattttgactgggataattgtggcattcccaacagtaagggttaagattgggttcacagaccaactctccttccctccctccctccctccctccctccctccctccatccctccatcccccctctctcacaaacacaccctgacaagaagtttgaccagacattgtttgaggatcagtcaatgggaagatgaatttagaagtcaaaggtgtgaacacataagtaagaatgatacaaggtatggagctggagacataggtcagaggttagagcacttgctgctcttgcacaggacacagtttcagttcccagcacccacatggtggttcacaagcatccataactccagttccaagtgatccaatgttttcttctgacttttgcttgctccaggcatgcactgtggtagatgtgtatatagacaaaacatttatatacataaaaaccaataagaattaaaaagaaagaatgatgaaaagtcaaaagtgaaatacattgcaaggatccagcaggcataacatcagggtttaggagatagagggataggatgggatccagtgacatcatagcagaaggctgttatttctctggcaccattgacatgcaggaataagacatcattccacaagcttgcgtacattttactctttaaaggtttcctttacaatttatgtgtatgtgtaagactgtacgaatgcatgagttcagttacctgcacagtcctgaagaaggcaccagatcaggagctaacaggagattgtgagccatctggtgtgggtccttggaccacgtcttctcaaagaactggactcactcttaacttctgagccgtctattcagccctgtatacattttaaatagagttctatccatcggctcactcactaatgtaactatttatcttactgtgggaatgatatggagagagatcagggaagcaatctacacatctcccatggagagcatatgttgcccacatactaataatatatttgaacactctgatgtctttgagcacttgttgaccttggactgttgacatcagctgcaaactaagcaacccatcagaagcttttcaatgagatgtcaggaaaacaccaccggaagaaagttcaaatatacctataaaacttcaaagatgacaatacggttgtgatttcccaaggaaacaacctgataagtcctatggcttgtgcagaatctggtggagggtggagaaggagaaagacagaggacaatggtgaagagaaattctgcttctagcataactatagcgtaaggatccgagagggaaagaagtggtttccatgcttcaggggcacgcacgggctttgctctaggaagcatggcatgtatttggaaggtaaatgctctggctagtcacagatggtccaggagagaagtggtctctggaaccaatgcaagtagacaccgaattctttggcttacacccagtctattgtagaagatacactctggaagggagaacagagatctttatgtagcttagtaaaagctgcagaccctggacaagacagggacacagcatggataagaactccaatgatagctgcagagaccctgggcaagccttgggcatagcacaggtaagcgattcccaccattagagagtgggtacaaacatctgcttagttagtgtttatagctacaagaaaacactttgtcaatgaattaaatcattttggttttaagatatagaataagcaaacatttctgcatcctttgtgtgtgtgtgtgtgtgtgtgtgtgtgtgtgtgtgtgtgtgtgtttgtgtgtgtaggtgtgtgactctatgattgtgtgtatgtgtgtgtgtatgtgtgtgtgtgtgagagtgcgtgtgtgagagtgtatgtgagtgtgtatgtgtgtgagtgcatgtgtgtatgtgtgtatgtgtgtgtgagtgtgtgtgtgtgtgtgtgtgtgtgtgttgtatgcctgagcgtgcacatttgtgtgcatttgcactcacccatatgggcatgtatagaggtcagaggttgacatcaagatctttttcctcagccgtttcttcagtttatttatttattttgaaaatggtctcactgaacatgaagctctccattttggttaggcagggtggccagtgagctccttggatccttgagtttccacaaccccctagagtttggctaacaggcgtattccatagcacttggctttactgggttctggtgatccaagcccaggccctcaggctcatgcaacaagcattttattcagtgagccttctcctcgagcctccggtaaaatttcaaagaggaattaacctagtttctattgtttagttttgatgccaatagaagaatgattggatattcacagttctatttgttatagcctggattgtttagaaagaaaggtcaaagacaagtaatcatacgtgcacagttgcttttgttggcttcataagtttcggattttaagtgaggggagagttcgtcccgagaaaaaggaaacgcagaattcacacaatggtttactttgcctacagtagtttcatgaaaggttgcagagacacattgcaggagacctgggtagtggtgagtgcttgtaatcccagaacacaagaggctgaggaaagagggcctggattacaacatgcaaccttgccgcaaaaataaaagcaatgttcgttcatggagagaaggaaacccccagagcagtcagagagagcagtgggaaactggtcctcagttccctctcacctcctgtttcctgttgttttagatctgatgttggggaagttatctttccggaggtttaggctggaacatcttcctctgtgtggctgctcaggcagtcaggtcccctgctccccagtgtggtagcccaaccaaggttggaagggggcaagtaacttggctcatgagagatgctgatgaagagagaatgaagaaggcagtgagggcctctgtttagaacacaaggttccttcctacccaacccaccagcccagggatgccagcaaagccctcgtctgttcgtctgctcccttgttagctcatgactctcatagcggacttcattccagtccccctcagtttgtttccacattctatcctgtaagcttcataatgcagggacgagttccaatgtcctttccacatctccatctccagcattcgacagaggtcttgtcatataccaccttcccccaaataccagcatgggaagaagaaagagaggtacaaaaataaaagaagtgagaagccaggtgtggtggtacatgcttgcagtgccagcgctttggaggcagaggcaggaagataccaagtttctgaggacagttgtggctatggagtgagtgagacgttgtctcaagaaaagaaaggcatctaaaagaaagaagcaggaccctagtttgggcagatgaacatatatcatctgaccaacctttcattcccctgggctgaaatatgggctgacggaggtgaacttctaaaccgaggggagggggcgggtcgtattgaggcaagatgcccgtgtattcaggaaattctccatgattgccgttcatccgccgttttcttcacatggataggaaccagtgtgacacaccagcccacccagcatttggaccaacattcacgtcaaaggcaatagagtatccaaggcacgaaaactaggagagtcgcagtgctttaggaagaccagtagacataatttggggagcgtataacattgggccttgtgtggctcacagtcagtattctgtgatgtgttgaacagatgctctgctatgtttattttgatagatggtcagaaaagcttggggtggcatctgtggtgcccgtcacctgggacttctttatagcagccaggtgtgagttcattacaaaccaaatgaagagggcagagttgctctcccctctcctgattttagaagggtttctataagaaatgattaattccctaagctagaaatgggagtaggaaaacctacgtggctttccaaaaatatacactaagccttacatcagagccgagcactgggcttcccttcctgatctgttcagtggtctcagctttcttggggttaagcagcccagaacaatgttgttacaaagcagagaggaaaatagcaggtccagtttaactcaatttctctggatcagggtgggtcacgtcatcctgaaatagcacaccaacagccaggattttctcaaactccttgtaccatattaaattaccaaagtaaattgtggctatattttatctgcaatatcagcaagatcatataacccagcagcagaggctggtaacacttaaaatactgagcttgaaaatgaaaataaggaaaccatggtcaactgtggcaaagatggagcactaatgtgtgccctactaatacgaaccttgagcctatgagctcttagtacaggacggcaaatcaaaactttccatccagctaattggctcagaatccctgtgctctgcctgcctggccttataaaccaaacccgagcctcatttccacagcttactgcaccaaagtttgttgccctgagcagtaattgtccctggtctgggttgctgaaggatgtagtccatataacccttgatgctttattggctgagtcagaagaggaaatgcagcctaaagatagatgaaattgtattgtcattttgatcctatcttctataaattttctgtaactggaaaagcagaacttgttcttagcaggtatgttttatttactgaacacttacagatttgtctaatgtaaaatagtactgttgtgtgttaaaagcacacatcagttaagctaagcactgtgttcaaatactagcagggctgctatgtaagcgattcttttcattcttcttaaccactttgtgctttaaaaaaatgatttgcttgaaagtttaacagccccagcaatcttacttataatataaacatattttaagttgactgatttgaaaatctagtaagtgagtttaaattgttgtgcttagatcagagtgaaaaataaatcaccttaattgccgagctctcttgattaggtgctatagaaatggtagcttaaaggcacagatggtcttcaacctgtgtgtttccagttaaagatttttcaggtttctgatggtgagaaagtcacatgtgtttggtagaaattgaagtttgaattccagtcttttctctgcccagtgctgttgtatgatgctagacagccacagccggcagtttccagttagtggaggcacaccagggagcatcaccaatattcaagtgtggactgtgtaatgacacaagactgttccacaggggaggtgtgtgtgtgtgggacctgcactgtaattaaagcaatttaattaattgtaatttaattgagcttaaagcttgcaaaggggacataggggagccaggtgagatgtgttagcaagcccttggttcaacccagagagaccctgcctcaatgaatccagtggaaagtaatcaaggaagactcccgacatcaaccttgggctttctcagacgtgtacacatgcatgcacctgcacacatgcaggtatatgcacatgccaaccacacatgtgtacacatgagaccagggggaaaagatgagctaaaacctacaactttctgtctgcttgtccctttttttccttagggggaaaagccttagaaactgagcacgatgctttttgtgaagggtgagtgtttaaatgtttgcagacagccatcacctccttcttgcgttcctcccattttcattttcatgcactccactgtcaagccaagttcttcattgcacagttattcagtatttggaaaacaaatatagaacttatatttacatttattaaatttgattttttcagaagaaatacaaatagttggtataagacataattcaatctctctagcaatgaaaaaagtacatttaaaaaaatgaaataccactcaaaatttggaaatgagcaatgactaacaaacggcaaagccaagaattctggcaaagaacaacaaaactgtaaccctcacacactactggggggtaactctatatggctttttttttggttttggaaatcaagttagcaatatatatgtcagcaatcacaattcaggaattatcataagaaattaattgttttggacaaagattcagttgtaagaatgttcatggcaacaacattcaaaataacaaaattacacacaatcttgtgatggttaaatcaattatagaatgcctgctgtggtactggaaaatgatatcacagaatatttaatgatacagcattaactggaaaaaatgggttatataacagccatgtgaagagtgagctctattcactaaaaaagagaggggatatatatatatatatatatatattatatatatatatatatacatatatatatatatataatatatatatatatatagagagagagagagtcagaaggttttacaatgagaaatgatcatttaaatggagaccctttttgtttcatgtgattatttcatgtcaccattgccaaatgtcatgggttgaatataaattgccctcaacaggcttctgtgtttgaacatttgatccccaacagaagacactgttttaggaggctatggaggagtggatttttatgggtgggcttttgaaggttggacacaccctagttcctgttgagttctttgcttcctgttatggttatcaagagaagtggcagctgctgctccagacttaccctgtaatgctgtccttgaagcaagggactgttctcccttatacggtgagccagaatcaactgttcttcctttcagttactcctgtatttctgaacttttgtcatggctatgtgaacagtaataatctactgtcagttactaacatgagttgtgttgctggcatgtattccctctgttcccttcaccatttacccttgaataatgctcacatttcacaagcctatgagatcaaggctcacatatggttgccatttctctgccatggattagtcttattggcatccagtgttgtatcactcaggagagcagaagtgacttttcgtgaggtcccctcgatgtctcatccatacccataagttattccagttattcatgcttggcatgcacaaacacattgtagttctctgatcaccaaccctgccccccacctcccacccccaccccctcgagctgtgttacagactggtaaaaatctacctcacatctctgtttctcaaagatgcccagacctaagacatcaaaatggagcttttgatcctctccagaatcttagccttctctccatgttctgtatcctagaatatgttagaaccacccattttcttgtgtcagtcagttcctattggatgtaacccctacagaattctgtaatacattattcctcctaagtgttcagggtccatgtcagaaggtccgcataccatatgcctaaatacataatcaataacaataaagcaaataaggtattaagcaaaatggttatatcctcctaccttgccagattctcttcaataatgacctaaagagaatattctaacaaaacatctctatttccttggaggcccatatttttaactagcagcctggggagagctggcccacatctcctggacttcaaaacacaggctatttagcctggtctcatcccacttgaagctctgcaagtattgttggcagagagtggctgtcagtatctcgttgtgatcaagctactgtgtcagtgagaaaatgccataagcctggttagcttttaaacaccagaaatggattccccacagttctagaggctgaggggtccaagatcaaggggtcagcaagacgtggtttctgggttagaaccattcccaggctcagagaatgtatctcagaatgtcttcatgtggtggaagagacaaagcaaaccctggggcctcccttagaagctgtctaaccccatccatgaggattccaatctagtcactttcctttggtcactaggtttcaatctatgaatttgcggtgtggggggggtggcaaaccttcagactatagtatccaccctggtcctaccgccaaacacaaaccaagacaagaatagagatgagaaggggtagcagtgggctctcagcaggaggcgcctttggggagaagtacagatggaaataggctgtcaggagactgcaaatccaaagtgagagggcccagatgtggccatcacattctcctgatgcatcccttgcccttcccctccacggcaccatgccaggctcttcctaatctccttctatggcctccagtgtaatctcgaacatcagcattttctcactgcagtatactcactgctctacagcccgctgatttgttttagcaaattaaatgcatcttggcctaatatccttcaaaaacccaatttctcttaaaggctacctaaattctttcctatagtctatgaaaataccctacggtcaggaagctacttacttctcctactctgtcctctgcgattctctacagtcattttccatagaccatggtgtgcccgctctctcattttccgtagaccatggtgtgcccgctccctcttctacttcactcgtctgttacgtcctaagtgagcctgatgacttttacttagccttcagccttggtctccagaggaatgaccttttcccaggccatatcaccttctgctgcccctccacgtctcccattcacaccaagcaagcggtggatcacggctggggaagttcttgagtcactatactatacatcacttcttctggcccactctcaagctaggaggcttgacagcaaccagtgagcctcagccgctacctgtgtctataaagtagggagataatgatgatgtcacctcgttaagccaacagagattgttcgcctccacaactcatcattaacacaaaaggaaacacatttgacttcccaacatccagtagattggctgatgacagaagatactcaagaaatatataccggatgaacatgcgagaagtcctgagctcagctctaaatgtccttaaaaatggacaagtcactgatatgtagatggagaagcccactgtgtggtgcaggtgcatttcctgggtgttttagcagttcctttggcatgagaacaaagaacactttgctgaaattataaaatttgttttgcactctagagaattaagctgatacactttgactcaccagaggaagcagtgtgattctgatcagaaagaaaacaattgttttccttagtcctgtaccttcttactgtcacatactggtctagacagaggcaaaagtgaatgtcaataagactaatccgtggcagagcaatggcagccctgtgtgagcagtggctgtcagaggctcttgtgctgtaactgttcggacctttgtactattgcaagtgtgtcagaatcttcttcctggaagaggcggcctttgtgagcaagaatttcatggaaaaactgtattgacctttctccttctttctcttctcttcccccttctccttcttcttgttgctagaaacaattctagggacttagaattttatttgaattttgccttttccagaatttttctttttccttctttcatttacacttgttttattcttttttattttacgtgtgtgggtgttttgcctacatgcgtgtttgtgtaccacatgcattcagtgcttgcagaggccagaagagggcatcaggttcagctgtaactagagttatagatggttgtgagccatcatgtaggtgctgggaattgaactcctccaagagcaacctgtgctcttaacttgtgagtcatctctccagcccaggtttcctttcttaatacatacatttaaaatgtcaaggtagagatgcctacctccttcaatataactgaacacactgaactgcaggattgattattcattgaaaatcagctgattatctagtcagagcactgtcctgttatttttaggctgtacatctgtgattcctgtccttgtgttaggacatagaatccatggcatgtgaccttcgtggggaccacaaaacactggagtaagaactgaaatgcttcctgctatcttaacttgtggtaaatgctacccagaaaaagttgctctgattaaaggggaggacgctgtcccagaagaaaacggcatgtaaaaaagcagctaacctgggagccagccaacagtttctttgctcctttgtagagatcaagatgaaaatgactcattttaaagataaaaagggccccttccacatctaaacgtatttatgcatgtttataatatgatatttatttatgtatcccatgtggcgatgtaagtgcaaatgatcctgtgacatatggagtgcattttctttaaaataaacagacacggttaatattcagaaggaaccaatagtggacatgagcgcagccccctgtaaatctcaaggagtttgaagacatcatcagcctcgggttagagaaagaactcatttcctatggcacagaggtgtctaagctaacaaaactgaggtctggttcagggcagtgaacttgtctctaatgccatcaagtgtgacatattgataagatgggatgtgtcctgtgctcaaggtggtacttaattttagaacagatgtgatcctatctacatttttcaatgattctttttctagagttgcgtgtgtgtgtgcatatatatatatatatatatatatatatataccgagggttaatgaaatctttggtcttagagaggaatcaccattactccacagaatcagcataatccttaacaacaatctaaacatctgcctttatacccacaggtaagtgtagtcttcctctctcatcaaggaaacttctctttgcagcagatggagacctgtacagaaaacctcaaccaaccaatcaaaatgcagagctgtagatcctagttccagtgaatactgctactgcacctcaagttgaggaaatactacagaagagggagaagaaaggttgtgagagccacacgaccaggaagttggctgtgagatttttgtctcccactaatatcagaagctacacccataaaatctcaccaacatgactgtgccaatgtcaactgaacatgcatgacaccaatgaacgtgtcaaagtgaacagagaaaagcctatgagccctgaaccctacacaaagaactacaagcagctaaggaatgctgggaatgggagaaatagtcagtcttccccaaggaagagcacagcagtgcgtatacaacgccaaatggtcagccctgagaacacacacacaagtaacagtgtatggactgagtagggtatataggagtatatatgtacacacccacccacccacacacacacacacacacacacacacacacacacacacacacacgtatatgcatgtaataacaatcagtggaaaaagatgagcatggatttgaaggagagtttgaagagttatttgggaggcatggaaggaggaaagggaagggagaaatattgtaattacattataatctcaaaaaagtaaaaaaaaataaagagaataaaccagctaatcttcatatctaaaaagatgaaaatgttccgtgtgtgcaggtatgtgcatctgtatgtgggggtgcatgtgtgtggatctgtgtgtagaggccagaagactaccttggctgttgttcttcagacactgtctgcctgattttttttttttttttttgagatggagtctgtcactgatttgggaattgccaactaagctaaattggatgctactcaaaccccaatcatgtgaaccaaaagactacctgtcttggtctccccagggttgggcttagaaggagtgctggcatatgcagccttctagacatagaagggcttcagagcccttacacacgtagacaaacggcttattgcctgagctctctttccagccccccaaatcacatttcacttgtattgttaagtattctaagtcactgtaccttatatttaaatttgggagaataagaaaccacaatcttatccaaattttatgccctaatttgttattagagctaaactattttgtgaggaactaaattgggaattaacgtaactgttggcttcaaatctgttatttcaaaataccaaaataaattcaggcttcttctcaaaacattagctactgaattagtgagttgttgtaacacaatttaaaagttaactgatttcacagttaccgagtacaaggtcacgcattgcacgtcagcaaagcataaagttgaaactgtgtaccacggaagcttcatatcattaagcaggtttggatggctttgtttccccccatcagtccctttgtgtgactgtaaggaaacacaaagagtgatgttcccttcaaaataaaccttcagggccagctcaatatagttctgaggaggaggagaagcagatggctagagccaggcgcctgggtagggcgggaggtgtttcaggaggcagcagttaaatcttttctacattagcaaaaacacaaaactaaaaatgccttcgcccgttcttgtcagcttttccttttccatagaaaagaataactcaggaagatttgcctatttttagactgaaacctgctgtcacaggaagtgattcatctgacccctccttggtatcctcaggatccttatactcctccaaactcagtgtgtccaccggtcagtgcttcaacatctacccagacatctggaaaagtcctcactaaaatcagaccccagcaaatccacaaccttcaaagcaagcagtgataggaaacggtggaaaatgcaatgccagcctaaactgccatcgtgtttttaggttaagggattctggcaggtcattctttttttttttccaaattaattctggattataagcttctattagttggtttgtgctagtgccacattgctgagagaatgacaagaaataggagccttgcaatcttacattctgtctaaagtctcccagacccattgtagaacccagaaaaaaaaaaaaaaccctcagatcatccagactggtttagttagctggtagagcaaaagcaagccagtgagttttctaagcatcacccagccatacttcactaaaggaagagtcatgtttgccttctataaaaaggcagggccaaaagaccaatattcactggctttccttccatccaaaactttccccacaattctttgccaactcatgagctgaagtttcaatttttttttttgcatggctgtttttcaaatagaggaaaattatgtggggtaattctcaatggtcttgttgggccatgcaactccctttagtttaaagtctccctgcagatctgtgaccagcttaggaaccacctcagccaacactaaagccatgccctactagtgttgctgctgaggcaagcaagcaaacaacaccatatggaaagaatattataggtgttggtagttttggggaatcttcatattgtatatagaagacatagaaggaattctacactcttacatgcaggcattcataactgccatcatcaaaccttgtctgttaaacttgctggaatgaagctgactcctctaagtggacagacacccactttcttgacatccatctttagaatgattggtgtctatctctccattaacagagcatgggtgggatccgaaacagagagggtgactctgtactccagcctcgttccataaggtcccctagatcaccaacagtgacactgactttgagatgatctggctccctcttctccttctgtttatagaggaataagtggtcctgagaggtcgagtgactctcctggggtctttcaggcagtctggaacgagagaaagtgaaaggagagtctaggtttttccatgcttggcagctgcagatattcctggaggctgaccatgactttgagtcagaaacgctctgaacagcaatgggatcattactgtttgttctctgtgtcattacattacagtttctagtctaagtccttaaaaagtttataaaagtggtttagaatctctaagaatcacaaatgattctacacgttccagagtatgcctggctgaattcaaggagggttacaaagcaagagcacatggaactcttgaacatgtaccatcctgaggctccagtagtctgggatccatgcagggtttagagtagtgccggtatgtccaagatacttcccaatattcatgtgacaaattctctccattaagtattaactttcctgaatttgcagcagcttgtattcgagaacgtctctggtcactttgtgtatctcacacccactcgattgaatgttcccaactgtgggtctgatggcttcatcttcctaccactggctcagctgagtcatctcctttcttatggcctagaatcaattgtatgaattgttctgttttggtaaattaattataaaattctcacaggtacacagaaaggcaatcataagtaactaacttccttgggattttctcaaagccaattgtctggcttttaacaaaagacacaaaaaccatggtaggatgtgtctccatcactaagaacttcataatctctttaaatgaaaccatgcacattaagagcttagttctacaaaggacacaggtcaagttagcagcctatacactaacagtaggagagttcagaggagagaggacatcagtatctccagaatcctccagtcatctcagaggttttcatagaagagacgggatttaggagaggatgcccagagtggctgtgtgagaacagaaggaagaaggcttgagctagggactaggaatagagctcagaggttgagagttgacggagttctacatgacgccatggatttgatacctaccactacaaatcaaatacatttttgagttagggctacgagctgaccaagtatcattgatattgtttggatcttaggtgtccctggggcaccatgtgttaaaggttttgtctccagcttggtgtcattgcaagtggtgaggactttaagggtttggacctagtgtgtgattgtgaccagtattaaacccattgggggattggcattaaatgtggactgtgggatccagtctctgattttcatttacttctctgaggtgaagctaattgatgatggtctgaactttgggagttgtcaatcaaaatagacatatttcttctttataactggctgtcttagatattcctcccagcaatcaaatgctagctaacagaggcactgggtacaagatgaagccacaagatgaacagtaaacagagctatggggagggaaagaactgatgcaagagtcagctcatttgtgcatctgtggagggtgtaagtgtgcccgtgcctgtgtagtgtatgtacacacatgtggcgtgtgtgtgtgtgtgggggggggggtacatgcatgtgtgcatgcagagggtgctgggtatcccgctttatcacactcagccttatttctttcagacagggttctgtacttatcttggggctcactgttttaggcagactggcaggccacaagctggcgggatctatctgcatctgccggccacggtgctggcgttataggcacattcacaaacaagactttacattggtgatttgaaaactcgggtccaaaacttgtacagcaagcactcttacctgctgagccagctccctagtccagatttagaactttataaggataataaatgtatatcctatgtgtacaaaatatcacctccttatataatgtgcaatatcattacatatggctaaaataatatgtaacatactacagtagcaaattaattttcctgtattctattttccctccttttccccttccttccctcccccaccctccctttcatcttccctcttttctcttccctttcctctccacttctttccttcccaccctgctacccttctgtgcttcctttctaagaagagacagagtgaagatattgggaaagtcagtagatgctcagtctctggcaatgacatgtcctagggatgcccaatcttcagcctgcacagacctgcatgctccatcacaagttgcctgaccctggaatggggagagatgatgtatgggcaactgtaaaataatgaaagggtcactgaacacagccagacagggagtgagaaattaaaggccagggatataatatggtttccctaatatgatttttggggtacactcttgatgcttttaatccccagactaacttgagaatttcattatgaaggtggctcaggaggtgacatgtttgtggtcaaaggcttatttgatgagttttaagaaacaacgtctgtctccatgcttctttcatttgtcagattgaccccatgtggaggtgcgggctaggaaaataaatagccaggataaaaaggtctttattcctctcacattcccttgactttgtcctttgtgccatggaaaactggaaaggcacattgaggcattgataacagctgtgtgagggcctacagtggcccctgaggaacagttttaacatactgcactgttagacgcagtaatcttgcaccctagatcatttggctcaattccccctagaaaagataaacagtgtctagctgtgcagagactcacaaacttcccatgaatatgtgttgggtacctatttctggtgtccttctggggtatccacctggcaggtatggatgctcaaaagctactgggtgaagaatgaattcttaaaatcttgttcttgtgggaggttaacagggaagataatgctgactccagaggaaggaggtcaggggcattatttgttgtcatctagaccttagggtgggaaggttcaagtgtgcgcatgaagggcaaggcagaggagagattgctaatgggggaagtgtgtggcacattccagtttgcagactgtaggggactattaaggatcagaggtggaaaaggttaaatgtggttgggtttttgaatctgtaaatgtcctgatggttcgggaaacaaacattgtggggttcatttagataggtttgggtggacgctttgcatagaaacatcacagagttagaaccttccacttggtatttaggataaagccacaactaaaactgccacagtttatctgttagtacagttgtgcatgccagcccttaagggcaatagacatggcacaaaaacaaaacaaaaaaaacacctttaaaaaaatgtctgtttcatcacaattcagtaatcaaacttctgttgcaaaactggtatattttgtttaagcccagagtgcatgcaatgtggaccgctgaacaagtgatgatatgaactgtgttgatgaggtgtccaaccaagggacggtgcagtttagaagcactctcaaccccgtgtcattccccaccttagaacttccctggacatggcagtgatggtgtgtggctttcagaaaagacagggagggatacatgggggaaagcatgccaaggaagaactctctttgaggaaagaatgaagcagaagcagagataacacatttaaaggactaaaagtcactaagtcaacagaacaagagagacgtcaagagggtcccacagggttcatcaaccagcaaagaagcaaaaaaagcaaaattaaaaaaaaacaaatgaataaacaagcaaagcataagcaaagaaagtgtattggatgactgatttccaaactggatttatgaagtccttgttggtggccttctaatctgtaacagagatgactggtcaaggcattttttaaatcaagtggggataagtccttgaacccagtcacttgaagccatgcatatattttaagtaaaaattgttgggtttgtggggatttttaggaggcactattgaccctaggcagtccatcacaagatctcagatatacagtctccttttcaggcctgaaggctggtcattgttagcatcaaggaaaacacagtccatctaaggtcaagacgtgtttccagctgggactggcagtggttccctcattgggtagctaacaaagaattttcagtgtgaggaccaaggagggtgggaactgtgctccagccttcaggtagctagtgtgctcgctccgtggttgggcatggaatgaagacatcactgaccgcacagggaagatttccaggctactgccctgtgggattttgtttattggtcaatttttgcaaacaactcccctctgaccaaacattcaaattgctgaagtttggaggtaattagggaggtggttctgtagatgcgtggagttctaggctttactggcgtctgagaagtgatctgggccagaacaccagcctggggtctgttctgtgtggtattatcagcagacactctgcttgctgctgccaggtggcttccagcaaaggaggttccctgcattgtcaggagtcctctctgaaagtatctataatcttagatccacttcaacttcttggacaagggcaggcttattagactctctctctctctctctctctctctctctctctctctctctctctctctctctctcttcctctctctctctctctgtctgtgtgtgtgtaactccacagaaacctatgtaataaagcatttctattaatatacatttttttagatgaagaaattaagacatagattagttctgcacctttcctaaggtccaaagagttgaaccaccatattgctccggtgtctgagcttatacctggtagaaaagagaaaaaccagttcccctctacccatcttaagtccattcaccagttgaggtgccctaaattggactactaaaagagaggttaactggaagaaagtaagaatacacacacaaggcacacacagatgatcacccagtgctgagggtctcaggcgatgcttggacttgttctgagacagcacctaataggatcaaaggacttcagaaaagtctaaagtcaaggaggactttgagtttccaggggtgacagagagagagagagagagagagagagagagagagagagagagagaaacacatggcaggcggcgggggggggggagggaactagtggtagacaaggggtagattctgtggtggcatttctggtgataaaaatggtccagggtagtctgaggtgattcatttccatcttctctatagagaaaaaggggggatcccttaatactcatgtctcctactaggcaaacatgatgatggaaaagagcctgcctcctatctgctttgtagtgaccctagacaggtaatatttgggacatactgttgtccttcttggttttcttttgtacataactcttcttgctattaactccaacatttgaagactgttattagggcttttcccatgctaactgagcccagttactgtgatcacactcataaccaagactgtggttatgagatagaaatatagtttagtttgtcagccatctcttaaaactggtgtccagaactgagttggactccagtaggatctgacatgattgggatagaatcatacaaagagaaggttctagaattggcattctagatgggacaattcatgatgggacacacaggatggtgtatacatgggtctgtacagatattctgacaggaggaacaatagcgctggctaaggaaggagcaaaacaaagttgttttgtaggtgcttggaccttcaaaacttggctttttaaacccaaatcccagtgatgaatgagaaatatggagaaaatactaatttagcatagaataacggcaggctttgcccctcaccaacactattcacaggggagatagaacattcaagaagtcaaacatgggttgttgacaggtaagtgcctctttatttattttaatttatgtgtatgtgtgtctacgtgggtatatgtaatctgctgatgtccatagagggcagcagaggtcatcacatcccctgaagctggaattatagacagttctgagccaccatgtggatgctgggaactgaactcaggcttctggaagaacagcaaatgttcttaacttctgagccatctgttcagcctaaaacatttttatgcgaaacccagaccatcgatgtagaagcatacagcatgtattaaaagtctacatagagagtaagctttgaaaacatgtttcacaactttcgtgtgtaatatgacaaaagaatcaagaaacgcttgatggcatgggccttgggttgggacctcatattaatgcagttcttatttgcacttagattaactgtcatattgtataaattctaattttaaagaaagaattacctgttttacccaaaaatgtgagagcaaaagtgccttctacttgaagtggttgactttgcatgatggcacatcccctgattaacttcagtggcatttgtgtttgcactgagtattgattggaggacacatttaggaaggccaagggatgaattgtttaacacttgtctacacgctgcttagcctagcatctctgctccgtgaatacacacagaggcaggctgactttttcatctttggtttctgacttaggagccatgcattttgatgacaggcgaggaaagaaaaaccaaatccccagccatggccagttctttaaaaataattctctgagatgagggggaaatacccagggttgaaaggtttgaatgggcagggtgggcagagtgaggaggatgggaggggggaactccaagaaaaccttcgggaaagacaatgcatggtgagctacctaaggaaaggatcttctgctgtatcttcaccctgtcaccagaaaacaaaggtgtgcagttcaaagttcacaccctattgagagtgaagaggttgtgttcacatttgtttgcaaagcctggaacttgcaaagcagacctgttgtcagatttttgttttgttttctgtacttgtatattcattcccttccctattacccgatacttcaaaactcctcaaactcgttttagagaagaaattatctagcaaagcaaaaatgccattttatatactaaaataccattcagttggaaaagaacatgtcctagggagggtttggaggggagtgcagaagatcaaactcggtcagtctcttttaaaacttgatgtctttactctgccttcactgctgactggagaaggaggggaagagagaacgtagtggcaatggagaaaggctttttattttatttatttatttttggttacagcctgaagagagaaggggtagctggatagaatggtcacaatattatttttaaagattcccagtgtcttcttccaaggttcagtggtaaattataaccctccttccattatctatcattttactattatttgaaaatgaaaaacatttcagataattatagcagacacttgtgtgcacactaaaacataacagatgtgggtgctctgtatatttactgcagatctatttttattttttacataagccctacaaataaggctaagtctccatctgggcctcttctggtttctcatctagagttatcagcttctcataatgggtggactgcatggctaggttttgtttcttaagaagatatatattgttatatattctatctattagtttgtctatatgtctatcatctattcatcctacttagcattgtctatttgacatagacaagagtcatctgagagagaagactcaactgatggattgcctagattagtttgtgggtatatctataggggacttccttaattgctaattgatgtagaagggtccaatccaccctgggtggcattattcttaggcaggtggttctgagctgtataagaaagctagctaggtctgagtttgtgaatgagccagcaaaaggcattccaccataatttacctgtcctgacttccctcagtattgaacagtgatctggacatgcaagatgaaataaaccctttcttcctgaagctgtttttctgtctttgtatttcagtcttatgtaaatgtcactgaattacatgactggcaacaaaactaacctgttttgcatcttgcttctttcaccctgtattaggtgtttgcgttttagaagcacagaaacacttgaattgtttcttttattttctttcagactgttactgtagaagtagaggatgttcaccccacactcccagcacccacatttctttctcataacacactcagcagacagactactattatctgcatagtataaattaattctcccttcaccatcttctatgctttagataagtgttcctcaaggaccaatgcaataaagacctcattccaagcccagggcacagcagggagttggtaaaaccttgccaaggtatagccagcccagtgggagctttccagtcattggaagtgcagctttgaagcagactggagtgcccaagccctttttatctgtttcccaggctgtgaggtgagcagctggctgtgccctgcacccctgtcgctatgcattgcctccatgcagactcaaaagcaacaggtctcacccacttgcccagtaagtcaaggccatccctcttactattcccctcccttcctgtgtcacctcccatctctaaggagcagtgtccgcatttcagcaccacacatgccctttgctccaaccttaaaaaaacaaaacctcctccctcttagtccgagttctctgctgaactcacagcaaaaatcctcaaaatacttttctctgtattaaggtctctgatttcttcccctttcctcttaaaaccatgtctgtaaggcatatctatgcacatatccaacactaaacttctcattgcctacaaatgaaaaaaaaaatttaaaaaattgcttagtcacagagagggcaaaacctattaaccagctgtgaacagttaaaacaaacacagtaagtaactgcaagaacactttaacaagtatggttttagctttgaccaacagctagtctctatgtgggaagccgaaggtggttccccagtcggagctggctacgctgtgtctctgtggccgagtgctggttggtttatttactggctttcaaaagtacctttttagttgttggtctattgattctgtctgtattctcattttcccctctcctcccctctttgccctcctcgccatttgtgggtttgtatgagggattctggttcatttgagaagtcccagcatctactatacggacatctttatacacacatttccccatgtgtttgattgtaccctcctatacagtgagtcactcggcctgttgctcatttttgttgcttgcactcaaaatgagagattcatttaaacagtgctttgttatcttagaaatgatctagtgactatgtttatttcacatttgctctaagtcatttaacagcacggtgatgatgacctgttttgttgtttctgaactctgaatatttgataattttgcagtttctgtaccattatgttctagaagactgtgtttcaccgcttagtacagctttcagattctaacagttcttgatgggggctgcccttatccagttgagattttgagggagactgctcatcttaactaattagtttaggaagaaagatgcatgctacaacctggactgtaacatctcctgagggtacctaccaaggagttacaggggggtggtgaaacctttagaagtggatccctagagagaggtctctagatcattgggggggggggcttgtcctcaaaggagattgtggaactctactctcttcctccccctattttcccctggccagatgagcagttatgttttgctgtgtgtttctctcctgatgtgttgttgtgctgacatgtcttgaacagtccagctatgatatctctgtaagtctttactcacccagcacttaggatggtagcccaacctctttattgtaccctccccagaatccagtattaagattcccttagctggcacttctgtcctgaggactgaagcccactccctcctttggtggtaagttgctccatacactgcttgtatggagcagtccctggtagtgaattaagcatgttgttatgggcaaggttctgtgggagagaggcctgatgagcagaacagacctgataatccagtgaccacaggacaggacaggtcatggtgaggtgctggcaggagactgtgtacctgacatggacccctctgagtgctcacagtctgcagtcactgtctggttcatggtcacttgccatcatttcatattacttcttctgagctggtgaggataattgagctgtattctggacactttctccatgaataattaggggtaacattcagacataataaacgtctgtgagatattttagcttacttaaagtaaaatgcacagtaaatgttaactttaatattctgtaagcaacaaattatttatccatagaatgtcttttagaagtttcctttagagtgcatatgtatatatatatatatatatatatatatatatatatgttgcatacacatataaataatatgttaatatcctgttaatcaacatttctcccagaggtcactgaatgtgactgttagaagtatcatgaaatgatccagtaaataaatgaaagctacagaggtataaagatgggaaattaacaagaactgatttcctggtgcagagttcattttgctgattgaaggtatttgttagaagaggattcactagacattaatcataggtattattttattatttgaatagaccaagtcccaacagtgcaggtcaaatcaagaaagcttccttgtgcatcctcatacatcaaggtagattgccatcctatttcttcacaggtaaccattgttattcttttgcttaaattagaaatgaagaaaaagggacgcaagatgagacatgaaactaagagacatattaaccagtttattataggcccggcagagtagagagagtaagagagaagagaaacaaagttaatggctgaccaccatgccccacagagagaagtgaagggaggaagagagaagaggcagagagagagagacagagacagagacagagacagagacagagagaagagagggaagagaagcaaagagaagagagggaagagaggaagcagagagagagagagagagagagagagagagagagagagagagagagcgaagaagagaagttggaacttttaaagggaagactgtgcatgtgcactgaagttccatgcatgtgcagagtcctcacgcaggctgtaatgtgtggcgggtgacgtggtgatagcacgtccctgtgcatgccctgactgttgtcagggggtgggttctgtctcttaaagaggtagagctgatcagcattaaagcctgaacctttcaaccaactcattgtccacatttgtgtttcaagtgcttgtgtgccctttacctagatgctttggatatttactatgtgtaaaacaatgaatgtcactagatttctttctccctttccccatcaaaagtaatagggggacaatgagttaatagttaatgagtattagagacaagatatgcatgaaattgagggcaaattattcacaaatgaaaattagggtgctagatgtgagagtttaactgtcactcaactcctcctgcaatcactggcaaagcgtcttagtgagggattatcgtgatcaggttgggctgcaacctgtgggagattatctggattgttgactgaggtgggaggagccatcctcagtgtggaaggcaccatttcacagacggggcccttcactgtagaggaatggagacagcaagatcattctaaccagcaagtgagagagcaaggacgcatttattctctctcgtctcctgactgtgggtgtgatgtgaccagctacttgagtcctgtcactgacttccctgaaatggtgcaatatgacctcgagctataaaccaaataagcccaatcctcctccaaggtgattctggtgaagatgtttcatgacagcaacagaaatgaaactagaaaaccaggagagtattattaacgcaacaaagaagatagcaaatgcttttaagaaaccagaagtaattacatagagcatctgggatcaaacaactctaaatcctgaatctgccactgacctatgggtgatgggagagatggatgaaataagtaagctaatgtgtagagagggcctgactgggtcggagtagaatagtatttagtaagcggcaggttggtcacctcctccttctccttcatcctcctgacactgttgctgctgctgtgagattcattacaatggatcatgaaaggtgaatcttaggtgaaatctggtaagggaaagacaaagagatagagataggttaaaggatgaaactaagcattcagcttctatcatgaaagccacagagcagatgggcaggctggcaggtcctggggtgtggcagttcttctcggtgtgccttcttcctccctagggtatcttcagggacttggagaacctttggtcttctctgttgggaagacctagccaaagccgcattcaaacttcggcttccatgtcaatgtaagcttatttccttaaaagggagaattatgccctgtgactctggaagataatgtctctgttacagaaatccaaacttcaaagacctggccattgtgttttagagtagattaaattatcttatctaaaattctgttccttttgacaacggaactaatattttcctccttggatacaaagatcacatgatccacgtatacatttcattttatcatctcagagattttttttttttgtcattttcttttagagtgcaaaaagtggatgctgaaccccttggggaaaaacaaggttagagttttaaacatgctcaattcaattacatcttcctggacttcgattaaacagcaaggaaatctctgttcctagcctgaggttgaatagaatatcccagtgctcttggtgagtttagagtttaagtaggacatttttatatttcagtatgtgctagttttctggccaacactcaagtatctgtcactgtggaagggaggggagctgggtcagggataatgagctctggactatgcagtaggagctgtggggctctcattgcagcatgccacttacttggcaaatctgtgtgaccaacgggagggtcccaccttttcagaacttaatttgctcaccatatggatttgtgagcttggaaaatacaaatgtcacttactacaaagttgggctcttcacagcgattcctcagacatttttgtacttgtaaggacatttcatattcagagtagagaccaaaatatattagttgggtgatttgggggggggtcatttataataaaaatcctcgtaactaactatggtgatttctatctgtaatctagattgtatcctatgttgataaaatttcatatcaacacatcaacatatgatatgatcgagagtcacctggaaagagaatttcagtgagagactgtaggtagatcaggtaggcctgtggccatgtctgtgaggattgtcttgattacattagtgaaggtgagaaggtggaaccttaattgtttttttgttttttaatgcctgtacagcatagataaggcacaccaaagctcttagagaattagattccctgggcttgggcctggactgtgtaagagtggagaaagagaactgagtgagtgcaggtaagcacacatatattctctccctgctctcagacaggaagtagccattcccaagaatccatctttattgactaatcttgtagggcgtggtcagtgctacaggtgcagaggcgagtatcactacataaccttctccaaccacaatctgaaagtttcctgaatgtatcaaatatcatcaccagtcaagaacaagtgtcaaaaacatgagcccatagagagcatttcaggttcaaacaattacagtttggtcagtggatgtagctgggagggttatgtggacgtttcaggaaacttgggcaaaagtgcattccctctctgtcccgctttcaagcggccttgctctcacccttatcttctcctctctctaagatccctgagatgcagatttgaaacccaaggctccagaggccatgctgatgcttgaggaagatgctcagccctcaggactgcaaagtcacccctgataccactatgagtctgagccttaatcccttaaatggaacatattcatatagcagagtaatactgttttctagtgtgtgacacagacccaatcttaacaataggaacatattgtctaaggcacattattattaaatgaaaactcccagttttcctgtagttggatttttaaaaactctctgggggctccccacccagctcccaagtaaatacacagagagttattgttagttatgaatgcccggccttagcttggcttgtttctaccttttgcctctgagctttttacctttcattattctatatatcttttttctccttcttactctgtggttggctgggtgcttaggtggttgacccttattttcctcctctccttttccttttctggtgccttgctcttttcctctctaaatttctcttcctatttattctctctgcctggcagccccgcctatcactctcctgcctagccattggctctttaggtgttttaggttggcaaagtaacacagcttcacagagttaaacaaatgcaacacaaaagaatgcaacacctttttgtatcatgaaattagtattccataccataaatgaatgtaacacatctcaaaataatattctacaatgatttcccatctggaaaaactgatctatgtcacactaacctcagaagaaaagaactcttttcttcacaatgttgggtgttggagtaggtatacttagtccttggagacagttgatgtcatgtccagttagtctgttctaactacatttgactagagtggataataattggttctagactcgaaggacatgcatacagtaagaggaagaggctcaagaaggcctgtgcaatcttcatattttttatgcctggataacatggataaggcacactaaagctctcaaggaactagatttgcatgaaaatgatctccagctgccatggccatttatatgtaggaagtgcccttgaaggacttgctgcaaggttgggcccatgtctgcacaaggaagctgcattgctgggggctgcacacacacacacacacacacacacacacacacacacacacacacacacacactgcatcaccagcagagttcagataagggtttacatgacatttctttggccctttaaagtgtgggtcttaaaatatctgctggacactccagttctcttcccagcactaatcaacaatgcactaatctaatgctcctgtaataattctaattccccctagcttcttccctctagcctaaaaacctcttctttttcagaaagcttgaagtaataaaaaaaattacaaaagctacctctcatcgggcaaaagcacattcctagggtaagtgataaggagccaagcccaagaagcagggatgatgggagataatcattccctgcacgttggaggagcacacctttactcccagcactcgggaggcagaggcaggcggacctctgtgagttcaaggacagcctggtctccagagtgagtgccaggataggctccaaagctacacaagaaaccctgtctcaaaaaacaaacaaacaaaaatacaaaaacaaaaacaaaaatcattccctgcagacaacttgatctcatgtctcaccattccaagagaattaatcaaaacatcattaagttcataagagctcattagagagacacaatagttagaaatattggtagttttatttaaaataaataatcatgcactatactggaaaaaataaaaacagggctggagagatgacttgtggataaaggtgaatgctgccaggcttgaggacttacctttgggactcacatggtacaaggggaggaatgattgcctctagctgctctctgaccttcaccagcatgggcttggtacatgtacacgcacaagcttgcgcgcccccccccccactgaataaatgtgactaagaaaaagaaaagaaaccaaaccaatgaatcaaagtaatatcaacctgtaaggctagcttcatcaataaataaactagaattctaggaagaaagttcaaaatttgcagagctttattaaggttgacttaaaaaaaaacaccaaggtatattatattctctgtaggatggcaactctcacacagggttgcgttttctaaattaatttttggtaacaccattcgtatcaaagttatattggaattatgtgactaaaataactccaagttttgactactaggagaatccgaatgaaattagcactgacttagaaaatatagctcaactttaagagcttgcttggagtgcataggttctgagcttgtttacataggaacagcttgatgggcaggtgtgtgtgtgtgtggggagacatttagtaaaggagacagtaccaggaggcacttaaaaagtacatatcttatttattttatgtgtgtgggtgttttgcttgtatgtatgtctgtgcatcaggcacacctggttctcacagaggcctgaagagggcattcgatcctttggaagcaaagttaggggtgattgtgagccaccctgtgggtactgggaattgaacccagatcctctgaaatggcagccagtgctcttaacctgtgagccatctctccagccccaagaagggctttgctttgctggcccccaaagactaaacctgtgagtttagcatcaaatatatttatttgtttatttatctatttctttgcttatttatttttatatctgtatgtatgtgagtacctgtgtgctgtggcctgcatgtacagtcagaagataacttgagagtcagtttgctgcttctaccatgtgggacctaagtactgaatacaagtcaccaggtttgacagcaagcgcctttatttctattctatatacagctgagcttttatttctatttatctttttaaaggtgtttatttttacttatttgtatgcaaatgtgagtgttttgcttgcacatatgtgtatagaccacttgcatgcctggtgtctgaggaagtctcgggaattggagtcacctggaattgagttacagacagatattagtagggtgctgggaactgaacctgggtcctcttcaagagtagtaagggctctgaaccaaagagccatccctctggctctgatctctgatcccaacgttcttgatagtaatctggctaggcttctgaaaaatggcaacacaaattttctccatgtatttttttttctgtaggcctcaatggattctccaaaagtaatgtttccaggagactaagcatcctcctggcccatagggactaggcctatctgttgacagggtccatgtttctaaatgttgcccttttccgaaaaagaaaacaggaatgagtggagaagttgtgaccccaggcctgaagcagagaagataaacaatgaatcttttccatgagtaaatatgaaggtggttggtgctcggaaagttcccacagggaactgaaagggagggaaaactgggcccagaatggacatccagagagagccttgtaaaatccgggagttctgtgaataaagtgacccagtctttgctgatactgagaggcaataaaaggtaaagataaagcaagctagaaggaagcctcatttggttttttgttcagatgaaagctgatgactacagaatgacagagaaaacgagaaagagacagtgtgccagcatggtcaaaaacaatgccatgaatagaaaccaatggcattcaaaatctgttgggtaagcagatacttagcctcatgtcatcttctgacaggctgcattttaatgagacagttacaaaaggaccccaaagaatagagacatttggccaacagcaacttaaccaggtgactcaagtttgcctccctcaaacagggcccgcccaatccgtgtgccttttgacaatagacacaggccactctagatgtatccctgagagaatccacggcctgaatcccctccagggagcaaaacccagacagaagtgactggaggggcattcagaagcacaattagtttgtactctcctggggaactgtgcctcttcctcgtctttccagttcaataaatctgattctgctgatttcacctcttaaatattgctagaatcttccacggctccagactctctgttacatcatctcacctaattgttaaaacatttgctggctgtgttcccctgaatccaggcttcacaggttagcctgagtgatctgtctaccacataaatctgcccatgccactttcccaagactctcagcatcagtgcgtcaccgtagactgtcaaacaaagcctggccagcaaagctcatccgggcccagcttccactttactttctatctgtattcttgcatatccttctcttaccagtgtcacactcttctgacttactgacttttcctagtttctgggctgaggtatggtgtatatgatttgttttatttttgatctatgcatttgtacaaacacatgtgtctgccggaattcatgtgcatacagatacccacggagagcagacgatcctctggaactgaatacaggtgtttgtgagctacctgatgtgggtactaggaactgaacccaggtcctttgcaagagctctaattacagctaagtcctgggcctccagcctggtatgttctgtctcacagaagctttatgtagaggcctagaaatgttctctttctgcactctctaatcccactgtccatttgtggaagcaagcccctactcaaaacaggtttctctctaaaagcctttctcaccctcctgtgctacctcatccaaatctctcctgagtcccatacacgacatttcacatgagcacttagcatggcactctgtaactttggtttatttgagatctgggagcctcccgggggaaggattgaatctgacttcttcagtgtttattattaccagatgcccacccaccacagttcagagcagacagcagaagctatatcatcctttttgattgaaatgcaaagataacattgccactgcagtgagagcagatggcaggagaggcattttgcataatcgcccatgttccaaatggtgcagatagtgacatttattggctgaggggacggtttcttgagccctgtattgagaagtctcctttgttacccagctctgagtttcagaattattctcaatacagggaattgggactctggagaagtgtctggttataggttacattatggaatctgaatgcataagggcactgtggctgtggcggaatgatcccctgtacactgtgaagacacattgctctcattgttaacaaaaagctgattggctgatgactcagcagattttcggggagagaattctgagaaggatgaaatcagaggagatgccataagatacacagtgagcaggatgggaagtacatacatgaagcaaataagccttgaggcagcatatagattaatagagatggattcatttaaattataagagctagataaaaaaggaagtccaagctattggctgagcatttataattaacattaggtctctgtgtggttatttggggagcgactggtgggacagagctggtcagcagtctagagaaaaaaagtctgcctacagagtacctgctcccttctgagcttccctccttgcacccaagctctatgttctgggtctactcaggatgctgaggccggaagatgatgtgctcaatgtcagtctatgctatagagggtaagttcaagaccagtctaagcaacttagccagatcctgtcttggaaaaatggagggtggtctatggctgtagttctgcaaatggagggtggtctatggctgtagttcagcacaccagaatatgtacctggaaatagtatgtgtactgagagtaccttgttgaaaagacacagaagtattctaatagggatccaaatagctaataaatagcttgagttatatagtcccaaagctaagatgtgtgttcaaaggtacataaaaatgtaaatttgggccgggcgttggtggtgcatgcctttaatcccagcactcgggaggcagaggcaggtggatctctgtgagttcgaggccagcctggtctgttacaataaatatttctgccaaaagctgcctgagccccaccgccacgtgtgagctttacaccagccgcctgcccgagttaggcccaaatgaatacacagaaacttgtattaagttcaatgctgcttggccaatgactaggattctcatctgtcagctcagtctcaattatcatacatctatatattttataagacttatcttatcagatgccttattggcatccctccttgttggtggatcacatcgtgatgctggagcaggcaaacaggaaaaagggcccttcctggttctccttcgcttaaatatgagtctccttgctatgtcacttcctgcctggatcagcacttctctactacatttcccagaatcctctttgactcctagtcctgtctacttgctgtctcataggccaaacagtattttatttaacaatcaataagataaacatacaacctgactctgtattggtaatttcccactatactggtctccagagcaagtgccaagataggctccaaagctacacagagaaaccctgtctcgaaaaaccaaaaaaaaaaaaaaaatgtaaatttatagttggaggtttaagccccacctcctccagttcccgattaatactcagaggcttaatattagttataattgtttggctaatggctcaggcatattcctgactagctctcttaattaaattgatccatgtttattattctagatttcaccacaaagttcatggctcgttacctcacatctggttttccccggaggctacatggcatctccctaactctacaactctatttggatttcctgcctagctacattctgcctggtcattggtagaaacagctttattcatcaaccaataaaaccaacacattttcacagcatacagaaggacatcccatgtcataaagtcattgaagaaatagttgcttacttaaaactgtccctttacattgtttgtagacattaaaattagcaggcaaatgtttgggaggctatttgcatatcttcaaaaatatcttttccaatatattgactagttatgagggaaagtagtaacattgactaaaaaccctggtgtacctcaaccgaatgatggaggctaacaggacaattttgacagtcatctttctgtcaatatggcatcagttcatcactaggcctcctttctttgggtctgcacaggcagcccctcatggtgggaaggcatgggatatgaaagaggaaagcactgaatttctcatttcctgatgggggaggtccttctgtgtatatgtttgttcttaaggaacaggctgtctgggcttgtatcactcagcatttcatggcccccatgtgctggcttgctaggtataggggagggtccttgatgggggaagtacttctgtgtatgtttatcttattgattgtttggccaatgaaacaacaagttagacaggactaggagtcaaagtggattctgggaaatgtagtagagaagtggtgatccaggcaggaagtgacatagcaagtagactcatattcaagcaaggagaaacaggaagtgtcccttttcccctccactcttcctccagcggtgcaatgtgatccaccggcaaggagggacaccaataaggtatctgataagtcttataaaatatatagatttatgataattaagactgagctagcagatgagctagctagtcattggccaagcagcattgtacctaatacaagtctctcagtgtattaatttgggccctaactcaggcaggcggctggcataaagtgcacacatggcgatggggctcagcagcttttggcagaaagatttattgtaacaggtcctgttcaattgagggaacagaacaaatccaccttctaataccactctggggaagtccatatcgacagacacccactgatacttgttaaatgtctttatgttctttgcatttctgaatactaaaatactttatgtccaaaaaaaatgttcctagataaccttgaaaggggcaaaccctcaaatagcaagtcaggccccaagtcaataagcttccattaggacaggaaaatacagggatttcagtggttcacacatgacttgtgctcattttcctattaggtgtcaatcctcaatcttgcactgttgcagtgttgtgtagaataataaggcttcaccagtgtcacctcagcagagctggacccaggcacagactcatctacactgaaccaaacccaacaccccgaagacctgctgttttctttaaaatcttgctaaatgttagtgaactaaattttgtaactatagttcttacttgataactgttttgttatatattttactatgctaatgttaaaatacttctttttatttagacagaaaagaggagatgatgggggaggtccttctatgtatatgtttatcttattggttgataaataaagcattgttggccaatagggaagcaagttaggtgaggctaggagagaaggaggattctgggaaatgtagtaaagaggattcagcatgtgatccccgggaagagaggacgaatgctgccggcatcctcgataagtctttataaaatatatagattaatggttatggttgataattaagacagggctatcaaataagaagtcctagtcattatccagtagccttgcaactaatattaatctctgtgtgttatttgggggccctaaagtggtggcagaacccaagcagctggtggaaagagttatcgttacaatttccctttcattttatatttttatacttattgctttaagtctgtaatgatgtaaaacttctcactagcccctgcccctctgtgtgtgtgtttgaaacatctgtatgtataaggtgtcatgaaggccagagaataacatcagatgtccccttctatcactttgcaccttattgtctcaagaaagaggctctctttaaatctggtgctaggatggcaggctgtaagccctagcaattctcttgtctcggtgccttcacaccaccagtgcaaggtcacaggcacacatgtggtcacagttgtgttttggggatttgaaatcaggtcctcaagtattctcatcaactgaggcatcaccccagtcctctgtacttcttatagttcccaccgcccctcgatagccccacactgggcaccaagagtaagacatgggtcactggagcaaaacccggatccaaacctgagcaactaaccagtcagaaacacatggacctcacagagaagcacaatgcatcacctgtgtggcctggttgtacaaggtgcacagcatgtaagtgcacacggcagggatctcatcacggggaagaaacataacaacccaaagtgagaggcaacccacagagtggctgatgaagacctcttagctgaagagagatgactaaaggccaagagagcatcgttgcctgcagaagactaagaggacatgacagctagacgagattctggcccctgtactgggtgctggctcagaaaacatgacatgagtggaaaaactggcaaaatccaaacaaggtctgtgaggaggttaaaagtagaggaaaaagtgttgtcttagcaaccagattgttgtggaagaaaacaactgtttgcaaacacatcaaagtatatcgtaaatgcaaccgatatgaaatagcacactatattctagtggatgaaatgctaaaatttccctgtaagttaaaacaaatcctgcaacgtgtctgccatttgccagtgtgtcgggggtgtctaataacacccctgcacattgctggttttgttcctttccctgggatgttgcagaatctacagtgtgtgtggtccaggttgtccataggctgtgtgctaactattggtgcttctgcttcactgcactaattcttcaaatttggtgatgctgctgggatgagggcttcgagccatacttgcatctgaagttggactggacactcctgggtgcacaaaaattccccatttccatgtccacaggactcaccaaaccattgtcatctgaggtccttctagggttgggttcttgggtacaaatgaggttataaattatgtaataggcagtgttccacccttctccctattctctggtgtgtcatcacctcttaggaaaggcccttgcagggcagggcaaaccacagcctcagcatggcctgcagcttctcctctgtgccaggtctcatacatgagcgtttgtgtatgtgttcacgtctgtgtgtatgtgtgtgcacaagtgtgtatggttacatgtatttatgcatctgtacgtgtgtgcatttgtccacacatttgtgtgcatacatatgtgtttaggtgtgcatttgtgtatgtgtttacatgtgtgaaaagtgctgtctataggttgggctgcacaccagggtctccctgcctccagtctcccaagtgctccctgggctgtatcatcctagatttcatgcgtaccaagctgtcttcttctgaggaaaattggttccaatttaatttaatttaaccttatgaagtataatctaatatgcacatagacgggaaaataatataacaaacacccacttaaaatgttagtatttgctttggtagaaaattgcctcgtcatctctttgctaaggagccaatcacagcagcaaagctcggagtaattaaattacaatgcatcacttggccacagcagccttcgtccctatacacatgatttcactttattttgatgtactttttcaaaacaaataatacatgcacaaaagaactggattaagcaagactttgaagttattacacttgcaaggacttgaaagtcataaatagtatttcttttcaaaatagtattaactcagctttttcaagtttaccttcccactaattaatgagttaaaaaatattgccaaaatctaggggccacattttcatttcatgactcacttcctgcatcccagttctctgaagaggttatttaaatttataatattttactcacagaataattaggatggcaatttattcaggggtggggtatttggcctgcacatctcctgtgtgtttggaaacagagtgtcccctatgaagaatagttgaaaaggaaccccctcaaacaacccatgactaagcctgagcacatttccagctcctttcctaagtgaataagccaagggtgtttgctcaccattccacacctcatcctactgccggagggtgatggcagaggtgggaccaggctggctggccccgcttaactcagatgatggatgcctgtgagtctgtcattcttctctcatgcacttgaggaaatccctgctgagaggcaccacactccagagaatcccctcgatagcatagctacaaacagagaacctttcttggaggttgatgaaaataaaaagagtgagtgcctaaacccatcattcttgggtgaggaattcctggagcaatagccgaacgccagctcagagcagtttcccttctatgcccgtaccaggatgactgcgaagctgacctcatagttgaccaccttctacaaatcttgtcaagctttgttagtgacgatgaacaggagactgcgtgcctccccttcttgccgtttctccatctgcttcatttgcagagcctataacactaaggatggctgagattacatgctagcataggcccagcggcactgtgtggatggtgctgtgagccattctgcacacgagattagcactgagatctgttgatttaagaggctagttatcttgcacaatcagatgatggtcataagagcaaatgctggggttccccaggtgagaaattctgtctcaaactataaaactctgaagaggagcaagaatgatagctcagcacataaacttgttgcttgttgtcaaggctggcaaccggagtttcagcaccaggacccatagggttaaaggaaagaaccaactgctgcaagctgttgtctgacttcacacttccacacacgcacacgtgcacgcacacccccccacacgtatgtacgtatattggtggatcaaaactagctgcttccagagctatctatctctctaacattagtctatcatctatctagttcctatatgtatgtctgttcaactgtaaatcatgtctaccttctatttatctattatctatctataatctattgatcatctatctatcatctgtctatccatctattatatatctagcatctatctagcatcagcctatctccataactatgctatttgttttttttcccctctcaccaacacaactcattagaggcaggccctccttcctccctttttttctatgttggtcccaggaacctcttaaagccaagtcatgaaatcttgagaggagagggtaatgaagaactgtgtttaggaccttgtggtgtatgaagggaaaggggtccacgctgtgcctggtagttaatttctgttaatggtactggtgttagttacagaacagtgggaattagattcacagatggctatactctttcctcaccctgcagatgggctatttactcttctccaatagcattttccccaatcagcctaactttggagagtacatgtttccacatgtctgtggaaacagacattttactttggaagcatttattataaacacatattgctatggcaaatggtgacaataagctttgatttcctctccctccctcccttcctcccttcctccctccctccctccctccctctctccctccctccttccttcctccctccctccctccctccctcccttccttccttccttccttcctttcttccatctgtcttccctccctccccccttctctcccttccctcttccttcctttttttcttccctttttgttttttgctcctgaccttctgttagaatggagcagttatggatgcacagacttagtgagttcctccatggtgtctttgtgaggcagctctgtgcagtggacagatggctttgcaatgaagaagcccattggtgtccattcacccagtgccagcttaactatcaggcctattcatcaccacctagtctgtaacagggacttactggatctagctggttgtgttactcccattcagaccctgtttaatttttaaaattgttagcttcagtgacagacaagtttcttttcactgagaatgaatttgagcatttattgttatttctctgtctaaaaagtgaagtgtctcacatcccccgttcccagcagtgtaacagtaagtaagtcagtatgcgatgcctgtgacttcagctgtaaaaatttacggtgcctctatttattcttgtcaattttaagagttaatgtaacttcttgaaaaattgttgaagggcaatgtggttaagcgagggtatgtctcccagctgaaatgtgagatttcctcatatacaaaaatcaaaatggatcataaaacagccacggacaccttttgccaattgtctgtagaaggagaccctaatgacacacacagaattcgactttgcctcatgccccagggaggcttttggctttagaattctgtctcattgctgccaaatgctaaagccaagtgcatcactccagctttagacacattttcatcaataaaacctcctataaaacagatcctgcaaatgctaacttatctgccaaatagccaattaattattttacatccttgttgaacaatgaaataatttatgatggtaagcattttaccatcacaaatgaacgctctacaaaccacaaggtctgcttttcaataagcaggaaggatcacaattagggatgaaaggaagcaatgctgtgtgctggaaattttccccataaagaaataaagctcccagggaacaatgacccaactaactaaagagagttgagcttttagagaaatagattcttctgaaagggaaaagttcaaacatcacccagatacccaaaggcttacgtctcataaattgtaggcagttggtggagattctcttgcccgccaggcactgctgtctattaatcccaggtcagatattgtctgtgatttccctctgccatccgaagtcagagttcctgtattgggtaaagggggggggtgtgcctctacctctctgttctttccagaggtgaggaaaaggagaaccgaagtagcagtcatgcatgtgttcttcaggtcaggccaagggcactaacgaagaaggactgtagaacaggtttcagatttcagctctttccgtcttagcctaagccatttgtagatgacactgtcagtgtgtgaaccatgtcatcaagtgtcctgtctgtttacctggaatgaaaccattaacctgcagggggattgtaatgagtggggccgttgaggcagagaaggaaatgccctcaggtccaggagagagggaaactagaaccctcactccaggatgcgttattctggaattctgttcaggggcaagacatgaaaaatatcaatagcttgggtccatttcagatgatacaatgagatgaagtttgatttaacatctcaatttgccttcttgccaatatcaatatctcaagtcattttttagtcttaatatctaaatattcagaaaatgaacttgctctcaagaaagcctccagtctagctggctgctttggagctgaaatccactgagtggtgagttctgaccttggactcctcaggtggcccctgttgaagttcctaaagccattcttctatacctgggtaaattgcttggcttggtctttgtttctttacccagaactggacaaaattgcatcttctaagaatttcaaagtgaaaagaatgttgtcaaggtttagggtgtgtgatctgtagttgtaccttctcttgtctcatgagattgagtgtttagctcagctcttggtcacattcctatctttgtgttgctggccaagttagaatggtcatgtgaggaactttgcaatcatttttctacttggtacaagccaccatcttaccttaggatggcccaatctacaacagaaatttgtctttgcaaacacgatgattagaatataatttgagaacatatttattattgtgtccatcggatgaccagcagttcctttaataatgaacttcttcggacttcattactctgattcagaactctctgaatctaatacctagaacaattttcaatatgacgtttatctagcttggagagcattttaatggattaatccaccatgtcctgaaattcacacatctaaccacaaataaacccaattcagagggagttcctaactggatctgtcagagaatagggcttggagctgggacttaagcattatgaagggttggttttgcttatggtgtttataatgggaaattaccaatacagagctaagtagaaatataagggtatttaatagggaaagccttacttacagagggacctagccagccagtgtggcagccgtctgtacgcaagccgaaaaggaaactgaaactgaaattgaccagccactgaccacctctcattctacgtctcctgaccacgcccttgcaggcgtggtcaggcagacctgtagccagcccctaagcaggcgtggctacaggttcccctacaggtgtttatcatgatcaaacaaggacagaacttgcttgtaggaacatggcaggttgctgtgatggcctggctatgtgctgtttatgccttggactgtattgtgagaggaaggcagaggattttggaggtttggaccagaaaagccattgtgtgatcagagctaaatgtgttgaaagaaatatatgctgaaagcaatatagacaaggtctagtttgtgaaattttagagggaagtttgagagtccttcaacaactctatcagagccatttggatgctgtctttgaattaagaattcatggaagtgaaatttggatttactggaacaatggatgctagagctaaaagaaaagaaaacagcgtgatggataaaagatccttgacattgaggtgaaattttctggtaagaattttcttagggtcagcacatagaagctgtggtcccgaggggccaaggatgcatctgaaagtggtacccgagtttgagaatgtgtaagactctgctacatggtgctgctgctttggaagccatgaaggaaagagtcatggaaaggccactagtatttatcacagcaacagaaaccaaactagaacaggttgtaataatcaatatgccatagacttggtggatttgacacacatctcatgcccagttctaaaggacgagaaggagaagatcaaagtgcctccgggagtctcctgagggctgcatcctggtgtgccaatgatccatttattcccacaaggtagagggagagagatggagagggagaggaagggggatggaggtagggtatgggggggaattacttgtgcttttttatgtattttgagataaactcttactatgtagcccaggctggccttgaacttaccatcctcctgactctgcttaccaacttgtaaacgtatgccactagatatggcttctgtgtcttcttgtaagaacactgatccatccatctaattaatggcccaaaccctagatcctaatcctatgtgtactgggggttaggctactgcatcttgtgtgtgtggggggggcaaattttctatccgtagcaacagtgtaggaggaacagatggtgctctgacagaaggagtcttgtacagtgaggttgtcatttcatcttggacttggaaatttagccaaacaccaagcttcccatcttttaactgaagagggcaggactaatagtctagcaaaggtttatcttcatgtcttctacctgggtattctaggcatttctattcattgcatcacaagaccaaagcttcagccctttggggcacacgtgactattcagaggtaggtcctaactggatctgtcagagaatagggcttggagctgggagggtgattgaaacatggaactgagtctagagagaggactctcggaagggatgacaactccatttctgtgcttaaacagcctcaccgacttaagaaatctggcttctcattttgctaagtttcttgttttcttttcaaaaaacatatgcatgactttggcattttgtaaggagaggctgaaaagcgttgcagtggtaattatgcaatgtcttcattccccaaatgattgtaaatgtctgctcttgaagaccggtgaaagaaatgcagttagaaagaaggacattcaggtcctattttatcatttactagatttggtcgctctgagtctctgtttcctcatcctgaatgtgggaaaatgactcctacctcaatggattgctgagagatgatgcctggaagccaaccagggccgttcttggaacccaaggctgagtctgtagagcctgcattaccaactggcactttgcagcaagtatttcgtcccacgggctgcattaattttcagatattccactgtgttctgtagctagagcatgctctctctctctctctctctctctctctctctctctctgtctgtctctgtctgtgtgtgtgtgtgtgagtgtgtgtgtgtgtatgtgtgtgtatgtgtgagtgtgtgtgtatgtgtctgtgtgtgtgtgtatgtgtatgtgtgtgagtgtgtgtgtgtatgtgtgtgtgtgtgtgtgagtgtgtgtgtgtgtatgtgtgtgtgtgtgtatatgtgtgtgtgtatgtgtgtgtgagtgtgtgtgtatgtgtgtgtgcatgtgtgtgcgtgtgtgtgtgtatgtgtgtatgtgtgtatgtgtgtgtgtgagtgtgtgtgtgtatgtgtgtgtgtatgtgtgtgtgagtgtgtgtgtatgtgtgtgtgagtgtgtgtgtatgtgtgtgtatgtgtgtgtgtgagtgtgtatgtgtgtgtgtatgtgtgtgtgagtgtgtgtgtgtgtgagtgtgtgtgtgtgagtgtgtgtatgtgtgagtgtgtgtgtatgtgtgtgtatgtgtgagtgtgtgtgtatgtgtgtgtgtgtatgtgtgtttgtgtgtgagtgtgtgtatgtgtgtgagtgtgtgtgtgagtgtgtgtgtgtgtgtgtgtgtgtgtgtgtgtgtgtgtggccttcctgaccaaactgtttcaaagtctttgaacctctctgtaggcctctaagtcacatgtgagcatttcactagcttcccatcttttttttttttttttttttttttggttatttttttttcgagacagggtttctctgtggctttggagcctatcctggcactcattcttgtataccaggctggtctcgaactcacagagatccagtgatgtgtgtgtgtgtatgtgtgtgtgtatgtgtgtgtgtagtgtgtgtgtgtgtgagtgtgtgtgtgtgtgatgtgtgtgtgtgagtgtgtgtgtgagtgtgtgtgtgagtgtgtgtgtgagtgtgtgtgtgtatgtgtgtgtgtgtgtgtatgtgtgtgtgtatgtgtgtgtgtgtatgtgtgtttgtgtgtgagtgtgtgtatgtgtgtgagtgtgtgtgtgagtgtgtgtgtgtgtgtgtgtgtgtgtgtgtgtgtgtgtgtgtgtgtggccttcctgaccaaactgtttcaaagtctttgaacctctctgtaggcctctaagtcacatgtgagcatttcactagcttcccatctttttttttttttttttttttttttggttatttttttttcgagacagggtttctctgtggctttggagcctatcctggcactcattcttgtataccaggctggtctcgaactcacagagatccagtgatgtgtgtgtgtgtatgtgtgtgtgtatgtgtgtgtgtgagtgtgtgtgtgtgtgagtgtgtgtgagtgtgtgtgtgtgagtgtgtgtgtgagtgtgtgtgtgtgtgagtgtgtgtatgtgtgtgagtgtgtgtgtgagtgtgtgtgtatgtgtgtgtgtatgtgtgtgtatgtgcctctgcctcccgagtgctgggattaaaggcgtgtgccaccaacgcccggctagcttcccatctttacattgcattattgtctgtccttaaaaaaactttctctctgtgtatgatatatatgatatcatatatatatatatatatatatatatatatatatatatatatatacattcatgtgctcctggatgtgagtgccagcacatatatgtgcatgctccagcacacatgtggcggtcagaggacaacctctgacgttggtcctgatcttatctaaactgacacagggtgtcttgttagctgttgtgtactccaaggctagctggcctgtggtcttccagggaccttcctgcctccactttccatttcaagtcaaaagcgctgagattacagatgtgtgccacaacatctggatcttcatgtgttctggaaatatgaatttgtgtgctcaagtgtatgcaggattttctagtccttgtggtttggaatattagtgtggaacaaactactttattataactgaaggctgatgcctgcttgcaactcctcgaaaacacacgtacattagaaatatatttatatagtataacatcgtctcttctcttccttatagtaaaggttccctcatatatgaatttgtaccacatgcaaagcacaagtgaaagtgcgggctaagtctcacccgagaccttttttaaacagacctggggcaactgggacttttaccttgtcagtttaattctacacccatgcatacatcttgcttccaatagtcacaagtgcaggtcacactcagagcgtctttgtgtctgtggcatcactgttagcattgttgtgataacatacctgacaaaatcaacttagggaagggtttattttggatgggagtgtgaagggatacagcccactgtggtggggaaggcatgagtgtgtgagtatgggaatccaagacgggcagtcccattgtgtccatggtcaggaagcagagagagatgaacgaaacgctaggctttctttctcctttttgtttagtgcaaccccctcccccccgtcgtttacagcttggtgctacctacatttagagtgggacttctaccacaatgtaatctagaaatgctctcacagacagacccagaggtctgtctctcaggtaatttccagatattgtcaagttgacagtcaatattcacagtcacccttcagacttgtcactggctttgctgtgatctcagtcttcagtttatgattcttaactcatggcctgtgctgcctcttcagtgctggtttcattaatccactttaatccaaggtgatctcggatgagagtcacccctggaccagtctgttaatgtgttatgtaaatgatttttttaaagacggctttctagattttgggtcacaagtggtctgagacaaaaaaaaaatccatattcttattaaccatcttagcatccaaaagatactttagaggttcttttgggatctggccctatagactgtaccctgtagctgtctgcacagcctgacattggctggcttcactggttcagctcagctgtgcctagtgactcaaagaagggacactattcactgtgagattaacttatgtggttttgtgctatttgaggtgatccttgccctccagggaaaaataatcagaggattatatagaattatctccccccaaaggctgtgaggacatagcccattatccaccttaggtggcagtatggccaattatgtgatatttcatctttgctactctctgactcagactgtaaactcagaaacacctgccattgattggctgagcccttcccaggcaatctggaaaagccgttctcatttaatgcacacagtctccccgacactttaagctattattcaggtcatttctcgtcttcattttatacttaggactgtggtccatgccagcgaggcatttttgtgttcccctatcccctctctaccagggttggagggatgtcaacatgaaagaggacgggtattatttagggtggcctgaggggtaataagtaggattaatgggatgaaattgagcaaaggaaaatttaaagtgaacgttgggaacattttccgaagattgagatcaatgattctgtggaattaagatccccagggaattcatgtgagcccttctacttgaaaaagctcaaacccgacaggaccaaatatttgaatataatcctaccttggcagagagtaaaacttcgatggctgcaagacggaaaaagtgacttcataggtcctttccatgcctgcctcatatgagtcattcaatgtacgctgctatgcgtcacacactcagccagacccaggtcattcgctatacatttcagccacaaaatcctcagttctgacttttcgccctccaaagaaacggctacttcagcagaggctgagggctcccttgggaactctaggtagtttatgatcgatttaaatatcagaattgaatgtagaaatctaccagggaagctgagggtgtatgtgtggtggggtgacagggggtggggttgccagtaagtgaatgcttgcccttaaactctgggaggctctcacccttgtcctttgtagatagaaaaaaacctctccataatagctggcatctgtaactccattcacaggcttggctagcttgaggactttgtagagctgttttacctctactcccttgccttgatcacaggcaccccatctcctgctgcctctcccagcctggggtggctgtgtctacagcaatccactacctcaggtgagcctttctgtaaggcagtcagtctcccactttgcccctgctgtggactgcttctctgcagtcagcatgcatggaacccagggtttgtttttaagacattctcatcatgatcagtttcattctttcctcatagattatttaagaggacttgtggggggtggggtagctcagtcaataaagtcttttctgtgcaagaatgaggacccaagtccaattgccaacgctcatgtgaaatagccgggcaacttaacatgcacctctaatcccaacaccgaaagactggaggatccctaagatttattggctagtcagcctaggtgagtcagtgagctccaggcaagtaggaggccctgtctcaaaaagaaaggtgaggagggattgagaaagattcctggggttgacctttggtcttcatacacacaggacaggtacccttcccaacacacatgcacacacatgacaattttagaattgtcgatactttggattcagcagggaggaagaccaggaacccatgagcgctatcatcctggcgaacaccctggtttgtgcctctttcccaaaactccacaaggagaagacagaagccactgtgatgcacagattcaaaatcctctcctgggcacatagcaataactctcaaaagtgggtagaacaattgctgtatgagtgggcctgagggagcccaggcacctgtcctaggccttggtgtattattttccttccttccttccttccttccttccttccttccttccttccttccttctttccttccttcttcctcctcacccccttcatcccttgacacaaccaagcaaacacgatattgggttcatgttcatttcctacatcaccacctttcttggtgctttcaacttctaccaagcagaaaacatgggcttgagcgctgagccactgttcatttccacaggacacctgggtaaactcccttcccttcatgcctcccaagatccagagaccagttctgcctttagcttgaacctaaagtccctctcttatttggctttctttggtcatctgtatgctcgtgaaaaggaagattggaaccagcatcaagttaggaaaagagttaaggaaagtgggttaccgaatttcagccaagtgagatatttgcttgctagacgtagtgctggaagcaccacaagtgaccattcctgagcaaggcaaaaggaacctaaagtcttcttccaagtctctgcacttaaagtagagaagtagatgtaaactcgggcttgatttcaatcttcacactttattgtttactccatgtttctcagagaaatggcagggcagagagttagaatctgagttcaaggaaaatgtggcgatgtcgagaaaagattagtgtagaagtttcctttgagggccatcttttatgagccagcccacagagggttttgtgagaagacctgggagccatgtgggttacaaacacagaaaatccatatgggcaggagaatggagggaagggaaggattttggcagaaacatttgctttttcaatatagtgtgtgcatatatgtgcaccatatatatgatcaaatttaaaacatttgagaagcaatcccagacatttcaggcaaaaccacagggtggttcatccagtccactaatgagttccaatcctgctgtgtggtctttcaaccccgagggttaggacctcaccatgtcggttatgcttcaatttgaattctgcctgtgctatacattttaagagtaggataaagggacaaaatctcattctgccatacaggaactcacctcccaggagctagcatttagccaaatggcttcattgtattttggagtgtttttagtccacttacttacaaataaattaggccatacagtgcctttgtaatgtacatcatgaaaaatgaatagtcagcttaaaatagattttcttttcctgccaagtgtattatgtgaaaaatgtcctccatctggccggctggatggtgtggtcgtgtggatggagcttagataagggatagtcctctgtgttaagaaggtgcctctcgagaccctgatccctatcaggatctttgccaagatggtgggagaagcccattatttaacaagctaccccttcttacacacacacacacacacacacacacacacacacacacacacacacacacttcccttcctgccaataacagcagcagacactcgatagtccagagtgagttaccctctgctgcttcactttccttttaatacaacagccctggactgagtgcccacattggatgtaatatcgagactcactgcaagctctgtcacaatttgagtggtattcaacacagagatgtaggacagtcttaaaagctatctggaagcaactgagactccagaaagccagagaaaccctgaggatgtacaacatactattaaacttgaaatcatattacagaaccacaataacaaaactagcgttggtgctgacacaaacacatagatcaatagaataataaaaaaaaactatcactaaaatcatgcatctagagccaagtgcctttttttagcaaagatacttaaaatacacattgtaaaaagagggcagcctgttctgtgtgggaagagtggatatccccacatagaagatgaagcttgatcctcacctctcactctgtacaaaaataaattcaaaatgtattaagacttgggaatgcttgaggcatgcttaggcaaagactttccagggaaacgaatcattcaggaaataccaggaattgagtgatggaaacagtcatggtggcgcacacctttaatcccagagcttgagaggcagtggcaggtggatctttgtgagttgaagttcagtctggtttacacagtgaatgttagaccagtcagggctatatagtgagaccctgtcatatttttaaaaaagaattgaaacattggcacatatgacatttcagtctcagcaccacacagaaagtaatcaaagtctggaaggcaatcatgggtagtagctgtagtctgtgttgcttagggaagactcttgatacctccctgaccaacaaattaaagggagatagggggtgtcccaacctggccctgcgtttgctatttgatgatctagggcttccagtaggtgcatcatgcatgcatacaaaatgccgccattccaactctccttttagagacacacttttaataagattactaaaatagtggatttgtctatggctttttcatacatccttatttttgattaacctctccatctatccttattcagcaccatcgaatcctgggattttcccacagaatctccagaaagaacgtgaccttccagcactttgattttagctgagaagtcatcttgaacttctgacctccagaacctgtggataatgatgtcctgttgtttgatatcactaggtgtgataattacagcagaaataggaaactaataaaatggtgctggtatcgttatctctgggaataatttatccaatgtctgttactcagagtaaaaattttctctggccatttttcttttcttttaggaaaagtcagtgttccaaaatgaaatcaaacgctttgtggtcacaatcacttttctaaaaaaggttaacaggaagatgtacacagatcttttctactcattactgtctttaaaataatcattacaaaaagaaaacccccaactttcaaaaagccatttgtttggtcagtcttgtgtttcatctggttgttggcttaagcctaagtggtcacctctctcaactaatccggggcttttaccttagatttaaaagtgctatgtttctaagaaaaaggtttataaaaaccaatctctgactttctagcagaaatcagttctcatgctatgcaaagtcactgtgccgccatttctcaggtagcttttcaggagatggccctggagaaggcagtaggaaagtagtctttgtcttttgtcttcctgtgatctccagggaccactgttaattcctgagttcttcctcctctcctgatctgatgtattcagccgagtaaactatacctttcattcttttgcaatcttgttccatcatctggtgttttcataatcttcctgtagtttaaaatgcatataaactgtccacactaacttatttcattaaatttgatttccttctctgaacactcttccttctgttttatttatttatttatttatttatttatttatttatttatttatttctcctctattcttatcttttcttcaagcttttatcaacgttttaaacctgcctgcccatactccacacccaacacccaactgaggttattattttagtcaaagtcacagatggccacttgcttgctcccatgagatcaaatgatccacatcaaaacatacactctctattgaaaagcacatggcaacttgctgtgtagacacatattgctaaagcctgttggactgggtaacccaaaatagagttccagaggtgggggagccccttatattcttgtccaaatctcctgctggaatttgggaaagcatcagcgacctttggaaaatgtgccacacctcagttctcatttctctgttctgagaggcattctttctttccaaccctgttctccactgaagcaaaccagacgtctccaggtatttcccttaaatactctagcagcctggcttcggcacctccaccagcaccatcaccttgtttattagaataagccaccaattcccattagtctaaggaaaagtccaaatgacttcagctgaggcaagcttcacctctgtccagctggcacaagttgagaagcttcctgttggctccctgaggtgacctgctgcctgctgaccaggtcttggttggagttcagggcatagtcatgaaagggcacacccttctccagccactggagaggggattcagagaattaagttctctggtgcctttccaacacaacacagatgcctttgctgtcattgtggattatgaatagagctgggaatgcctgtgtaacggggcattacagttaatttttcctctgtgataggttgccaggactttggaaataagtttccttattcttgcttggaagaatatccttgattcaatggatattttggtagaagaaccttattggtcctcgttttacaactacattgctcctgatggagacaatgcaatctgccaaatatccacttctgctgccttttagatctgcatttctcttctgaaaccaagcctggaaatttccttcttcatactttttcctgcaaaatctaggggatcactgtagacatatagacaaatactgcccacacccttgccttagagacaggactcaccaaatagcttaggctgttttcaaatccctggaaatggatttcaaactcctgagtgctggggcaacagccatgagccccgacaccccagacagacatattcttctaaagcaaaacctctctgggcccatttgcaacttgagtggagtatacttctagtgaaatgcttaagaccatttgaatttcagattattttttatttgtgtgtgtgtgtgtgtgtgtgtgtgtgtgtgtgtgtgtgtgtgtgtgtgtgtgtttacatattggggataggaacgaagattacacagaaacttcatctgtttcatggtcatctgatacacatagctgcatagacaatatttttaaaggatatttgtagcttgcctgtattttgactgtgacctaacaattgaggtcagatgtggaattttccacatcttcaatatgtgatgtcatattatcattttaatgttgaggtgtctcagattttggattttgggttagggtttctcaatttgtgtgagttgttccatgtgatgggcttgtgctcttgggcacagaccaaagtttgattccgcttgcttttctccctggtccagaggtgccagggtagagacagagcagcagcctagcacgacgacatgtgtgggctatgggaaacggtctagtcgtttgctttgctctcagacattgctctcactgtctcgactcccaccagatctcctcaatagacagcgttagggtacctcactgcccacatagagtgacttttcatatctatggaccagccagtgaatattatatgtaaatgttattcaatgtacacacatgtttagaaaaagtctctgaatactatgtttggtatcttaattttatttttataataaaacactgaccaaaatcaacctggggaagatatagtttatttcagcttctagcttccagatcacagtgcaaaaacagggcaaaggaggatgagaactcaaggcaggaacctagcaggagtggaagctatgactgtggaggagtgctgcttatgagcttgccaaagagcttgctggaccacttcaacaggggtgcactgctcaccatggccagcacctcaccccacatcaactgttaatcaagaagatgtccagcagacttaccgacacaccaatggaggcattttctcagttaatgttccctctttccaggtgacctttgatgtgtctacttgatgaaacctagccagcatgtgtatatatatatataatatatatatatatataatatatatatatgttatatatatataatgttatatatatgtgttatatatacatgttatatatatgttatatataaatatatatatattatataacacacacacacacacatatatatatatatatattatatatatataatatatatatgcttaataagagtattagctatgcagccatatacaatggttgtaagcaacaatcatgagcaacatacaaaggaaccagaaaaatcagcgtaggagcaatttaaaatccattccaatctttctctactgcagagagaataggatctcagatcccactgtgtagacggaggggagctggtggagaaggcaatggccaggaaggggtcggaggagtgagggaagagaacggtaggagttggggtggtggcaaacaggagcaacacatacgacaaggtgttacggaggcgccactgttttgcaggctagctgacaaactaattactaaagtaagcttgacactggggagattcctccctgaaaagctagaagaagatttaaagataatgacccaaacatgtcactctggcacatggttctttctgagctgaaacatcaaaggcattttcctggagctgttccttttggactaaaagtggaaccttgtaagctgccgcaaactctctctctaaggagagtcttatggtcaagaagactgaaagtcaacttggtggagtgattataaattgatgttacaaaaacacaccttggggctggagaggtggctcagaggttaagagcactggctgctcttccagaggacctgggttcaattcccagcactcacaaggcagctcacaactgtttgtaactctagggtctgacaccctcacacaagatatacatgtaggcaaaacactgatgcaaataaaacgaaagtaaattatttaaaagcaaaccaaaccaaatcttctgctagttggtttcccctgttgtggttacttttccataacttaccgctccagctgtgagaaactcttccataatctgctgtctttaagatggcatacaggctactgagtttaaaactctcttctttcttgagatgtccatgtgtgcaaagatattaatattactcaacaactcttgctagtttatctctaataagtataatttataggcctggcaaaatctttctccttcataagattgagatcaggagtactggttttttaattctttaaataaaacaaaaacctaaagttatattctagttaagaaagtatgttattgctagatcatgaatggtatcactgtgtattagcctttatttgctaatatcaatgatttttttattgggaaagtttggaggatggatgagtttaactggaactgtgtcagcgtggagttattttatgtccattgactggaggattttatatatttactacaaaatctgctactttgccatttattttcccccattcactgcaagttcttaaggaagttaaatgtgcttcctagtagttcacggcttagacatacaggcgtgggtaaatccagtgagtccttggtcatgagttcttacactgatgctttagtctggatttactaagttacctgtggacaaattgcttgaaccagagctctcattcccacaatgactgcagtccttgaaaaagctacatcatttctgtagcttccttgacgtgaccgttgagcattggaaaggagccaggtgttcaaagcctccctgctcagttttcagcgttgttttgatgaaacctaatgtgccctccagagctagctctcaatttttcaatagccaaggaagaagctgataggacccttttgggcatctacaacagacgtgggctgactggagaaggcccacactgcttatttatgtgtgcgggttaatgctaaaaggtgccattaagggggaagaccacatctagtgttaaagcagttaaaatcttaaacatccctaatgactgcttttaagtcattgctatttcttctaaaaacaaactaaccctgccctaagtgcagggcactcggattacaaacgacaccaggcatctgggttcctcatcacggagcttctgccaaggatgatttagccattcagtgtgtcagactgaccttgagcttgggggcagggagtacggagaagcccaattgcctcagcatcgtcttctcaaattctaaaacataccgaggaggggaaaccaccaatctgacttcttaactgctctagttaaagtctataccctacatcatcactccatcacaactgtgtgtgtgctggaagcctttaggactttcacatattaaatcaaacagacctttaaagaaagctcttagtgaacaaggagaggaaagagagatgcttgtatgtgaccctcagagctggcatgattgaatacggttgtttaattggaggcatctgctggtgtatgcaattttactgttctgagaagtattaggctagagtgtggtggggctgtgtaatggaatggaacgttgtccgagtcacaggaggacaattctgaatacatgcagaaatacagctctgtgtcccctgtatataaggaccaataataaggaccatccctagagggatgaaggagctaaactttacctcagaatgtaagcaaatcagaagtgttagccatcaaagcactcataaagccacctcccttagtggagaatgcaaaatgtgtcatggtttgtctggaaggttactcaaatacctagggatggcctgatctttgcagtgtgcagctgttgctctcacggtggcgagtcttgataagtgtccgggcataagctgagagtggcagacagtggcttctgaggagacaatgagtagtgagtgaaattcagggtatctctgcttagcatgcacgagggcctgcgtaagaccctcagtgcatagctcactccccagcaaactggcttacatggaagcatgttcccatctagagggaaaatttgctgaagggagctgtccacccacttttgagatcccatgtgttgagttacatatgacctgccactttcttgggcttcccatcaaccgactggaataccaaggcaatatttgagacagttccataaactgctcgtggtattagagcactgttttgtgggtatctaccacatatcacatcaggtacaaagtaagggtttgtttgttatcaaattgaatgctatatctacccaagtcacagcaggacgactgtaaccacctttgttaattgggactgaaaagacagttcacactgctcaaggttgtacaaacaagagctagttgtggtgatctatcccttcaattttcagctcttggggtcaagagttcaagctcactctcaggcatccagtgaattcaagactatccttggactgcatgcaaccctgtctcaaaaaatcaagcaaacaagcaaacaaaacaaaatgaatcacacagctaatatttggtgtgtggaggcttaaactcagtcttgtgtctgcccacacggttctagtcatcctttcctgtaggtgattaatttgaatctgagggtgtgcacctagaagtgacatagagattgagctttcaaacagaagataatttgaaagaatggcgtcaatcaaggaccatttagaaactgctctctgaaaatgactccaggactacacaaagaaaccctatctcaaaggaaaaagaaaagagcccatagtcagtagagttgtgccatattcactgggggattagtgtcctgaagttctaaatgtgacttcagttgaccttccagccacaggtcaaaaaacaattgactctggcatttttggatggttgggaaaacctaatacctagatcagatgttggatgttctggacccacagtccttgagcacgtcagtttgtgtctttgtgcatgtgttcttcttaatatacatgtcccaacgcttctctttattttggtgccaaagactttgcaatgtgttgtttatatactaaaactgcttctttggattctttcctcgtagctgaagggcaaggttacatctaagagcacaacttagagttgatgtttggcaccccggtcatctgtcttctctacccaccaccctctgggcaccctggccatctgctttctctaccccaccactctcgagcaacctttcacttgtttgaattattaccacttagtgttgctacatttcaatctgcctctctctctctctctctctctctctctctctctctctctctctctctttctccacagtgaaagagtttggtgaggccattcagaccaaagattcaaactgcacatatacctttgaaaaagaacctctaaagagaggtttctaaattgtcagggccagtagcagcattataggttataaaaagctgggtgtgtgtctgtgtatgtgtgtgtgtgtctctgtgtgtatgagtctgtgtgtgagtgtgtgtctgtgtgtgtgtgtgtgtgtgtgtgtctgtgtatgtgtgtgtgtgggtgtgtgtgcctgtgggtgtgtatagatgcatgtacatcctacatgtgtacatgtggaggtgtgtcatgtgagcgtctattttctctctctctctctctctctctctctctctctctctctctctctctctgtgtgtctctctctctcatctatatacatacagttccctctttggaaaccgtattttcaacactcagtgccaatcccaagcatttttgaactggttggatcaactttgagtgcttcaccttcttggcaatagagatgaattcaaggtttgtggcctggctatctgaagccaaagtcctttcctagaatcaatacagagatggaaaggggactacctatttttcttgctggaatcattcagacataagtgtgaggagtgctcagaaagccatgtaggactccctggaaggatttttctatctcttagaaaaaagtcagtacccagagagcagtgatggagaagcagcttggccaactgagctacaacccaaattgtgtttaacaggtatatatgtgtttgtgggtggtatgtgatgtgtatatgtgtgcatggtgtgtgtgtgtgatgtgtgtgtgtgtgtgtgtgtgtgtgtgtgcatggtgtgtgtgtgtgtgtgttgtgtgtgtgtgtgtgtgtgtgtgtgtgtgtgtgtgtgtgtgtgtgtgtgtgtgtgtgtgtgtgtgtgtgtggtgtgtgtgtggtgtgtgtgacatttttctccccttagtgacagtgatgtgagtcagacagttaaccttcatagtcaggatgagccaggagtctctaccttccacactgtgggatctaaatgaagcgtggacaactgaatttcaacatacacattattgctaagattgatggcatttttatggcagagagtgttcctgtagccagtctcctatgatgtaaatactgatttgcagatggttttgactaatttgtcaagttgacattgcagcctatagttgttgttttttttttttttctggttttctgggaagttaaggtgtatacttaaaaaaattttgttagtggtatctttaatagactcaactagattcatttaatttagtttattttaacatatctggactaggtggtccacaaaatccttttctggaagataagcagtacaccacttagatacaactttgtgatgcaataatcctgcttccatgtatttgggaattctgggccaccataccagacctggtgtgatgacctcttcgtttgtgggacattgactaaagcactgaggatttgcctttgatttgacctttcattcagctcagaggtcttccataattagaagccaacatgattggaagctaaaacttgttaaatttactgcaaagatcgtttatatgatttctagacctaggtggccatgcaattgcctgtcaacatctctgccagctctacaacttattgaagactaccaacaccacagggaaaccccagtcctctgcatcttgttctgagttttgtttattttaagcagttttaattttatttatttgtaggtgtgcatgtaaatacacacacacacacacacacacacacacacacacttctttaatacagaatctataaataaccacaatagctactctaattaaatgtcacatggattccagtggaagagaagatcaaattggtggggcccctggagcttttactgctcatttccctttttccttctctcacagggctttgcttttggcatctggattgttgacacgggtgactaagccttggcctggagggccttccaagctgctgacttttgctttccacctgggagctggggtcatttttccaagtccggcatcctggttcccaagtcctgggtgggaggtttggatcaggaaaccagggctcctgagggtcagctcactgctgttctgggtttgaagtcagtgtcctgagcacatcctttgactctcagattggttcttgtgaagcagcttaagaccggaccaactatagatcagttagttaaaaaattataaattcaattaagtaacacacattttcactcacaggtcagcaattaaccagtttgagtgttatttcaaactttggtttgaggcggtatctcctataacaagacccagcacacttgctttgattagcttgattaaccaagaaagccttgtcagggaaaattagtagatcatataaattgattttaatgacatctattgtcatctttttctgccaatgatttgaaacaaaattgaagccttgcatgatttctgacctgaataatgttttaaaacaagaattgcttcagtattgagagtctctaataagataaaatatggctggttgtagctttgtgtctgaggaggcagctcagctggcagagcacttgctcaccattcttgaggtcctgggctccatctccagcattgtatagatgacgtacagtgcacactgtaatacactgagaggcttggggggatcagaagcacgggggtcatccttggctatctggtgaattacagacgatcctgggatacatcccttaaaacaaataaaaagcagagagaaaatctgattatagccttagttaaaggctaagggtgtttactgggtggtagtttcttgctaaaagacttcccagcttcccatgaggctgggccagatagttctggaagggagagactatggtatagaagtcaccatgaggggccagatcccatcctcttctgcaagcattttgctatccccatgctaggatgacaagatttcccccttgtgaataaacatggccccacctaaagtgaggccaagtctctctgtctttctgccttcagccctctacagttgtcttaaataatcttaaataacctgacactgggcatacattagagctggctacaacaacatggagttagaacttaaagttgtgagttatacagccttgatacagggggagggacttggtcctgcctcaacttggtatgccagactttgtgactccccaaggagggttctaccccctgaggagatgatggggatgggaagagatggagatgagggggcaggagaaggggagggagggaacaaagttatgagttatattggttcttttgattataattctttcaatattgatgagaaaaaccatactgactattttattaactaagcatcagttgtttacttttctccaattggccactgaccctactaaattgtaacctctaaatgaattgttttggctttatagatatacagatctatccataagaatctgtcttttctgattagaccaaatggatggtgcttaaaacaaacaattggctaagagagtatgtcctaaagtctgcaaaccgcacgtttcctcacctgcctcttttgtactggctctgacacccctgcagcgtcatgaatccattctggtcagttgcatccaggacagacacaaactagtttctcttgcctcttgacaatctccaccacagccatcgtggacactggtctgagtgaacgtgtactctgaaagaacaaccaattagtggaaaaaagacttcccaagtgtctcatgtgctttctggctgacacatttgggtggtacacactccaggcgtggaaacatttgtctataggtggctataatcgaatgtacactagtactgttcactaattccttcttcccccaagttcatggctactggtcagaaaaagaaaagctatgacactggtcccattggaaacagaaaagacaatgaatctcccatacatccccaaggcccatgacactggtcccatcagaaacagaaaagacaatgaatctcccatacatccccaaggtttggcattgattttcttatccttcatgtgattcagaacccaatctcatagttttctttaggtttatttgcttgcttagagccatcttttgcttataggattgagcaatcctgtctgtgactcgcatccctgagatctgggcttaaacatttgaaaatgtagctaaagagtaaacagattttttgaagagactttcttttgcttctttttcttcttctgccaccctctcatcctccccctcccctttccctctccttttctcccttcccttttctctccatccctctcctcttcccagtctctttcctctcccttccctcctccttctatcctgctcactttttcccctcctccttttctgcttctcctccccttctccccttcccccttcttctcccttccttcttcccttctcttctcctttcactctttcctcctctcctcccctcccctcccctcctctcctcccctcctctcctctcctcccttcctcccctcctctcctctcctcccctcctttccattctttcatcttctgctcatctttgtcctcctattcctccttttttcttctcgtccttctttctttcttcctatttgaacataaatttatgttcaatgctatttatgatattctttgacaaaatgacaatccttttaattttcaaaggtaaatatgatattttcacacatttattagctgctttaagaaggaaatgagtggttaaaggtagccatcacttcaaacgttgataatttcttagtcccaaggcattaaaatctacacttagccattttgaattgacgcatcattcttagctacaccctcctagtgtgctctcattcttcctaattgcaactttgtacaacaacagccaacctttctctacccatccacagtagacagcatctccccacctcctttggttctagtctgtgctctttaccaaggtgtgtgtgtgtgtgtgtgtgtgtgtgtgtgtgtgtgtgtgtgtgtgtgtgtgtacacactgcagtaccattgcagaaaatagcatgtagattccttttaaaaaaaatcaaaagtagtactaccataagagacccaataataattcctttcctgggtctcccatgttcccaacagccaaactgtgcatctccgtgcatcaagacacgcatggagaaggaaagtgccatgaacacacacagcgggaaatgaaagatgaaatgctggcatttgaacttatttgaagtttcttaaaaagtcctgacattcgtttggaactctctaagacactctgtatgatgctgttagtccacaccattgctgtgctctggatgtttggttcacctcacatctccaagggttaaaggctaggtcccttaggtgacatagagactgttactgtagatgaaatctactggacacagaacacatcacacagccagacattgcacaggtggagtctggacagtgtacctgatcaccattaacaatcccactcacattagatgaggctgtgactagtttgaatacttaactagcagttcctttaaaggttaagggtaagtaagccctacacgcaaacacatctgacaccattagctgttaagggagctgtcacttacagtaacgaatggtcagtgagtggctgacaggcaaatagatgctggaggagatgcaaaaagaaagcagatgcccacacattgctggtggaagccagagtgctacagcagctcagtctggcagagccttaaagtctcagcatgctcttacatacagtttcactggttcagtcttgggcttttgtcctggagcaatgaaaacttacgtccacacaaaacctgtgtgtgaatgttcatggaagctttagtcacaatagcccagaactggagacagcccagatgtccttcaacaggtgaatggttaaacaagctgtgacagtccacaccaagaatgttatgcaacaataaaaaacgactgatacaggcacaaacttggatccatttgaagggaattgtgctgagttaaaaagagacattttaaaatgctacatcacatgacctcacacattcaacattctcaaagtagtgaaattatagaagttgagatagggaagacattaggggtcgatatggctgatgagggaggggtacagggcactgaggtgactatgaagaattcacatagggactctggtgacaaagcagtttccatcttgaaggctacatggaactatatttgtaagaaaacacacagacacatgcatacacatgcatgtacacatactcataatgagagtatgtgtgcatgtggatttgaggaccctctgacatttcctcattggcctcactactgtatttctcatttttgatgtcctgctatatttctgaaagtcacaagggaaccaggggacagacagggattacaactccacacttccttttgtaaatttctgtgaatgaaaaagcagtgtgccagactctatataaattccattctcacactgttaataaagtgcattctttcactgagaacaagaagaaaacctgaaagctccaaaagggtttatctgggaaggtaggagccagccagtgtggagctgctgctgaccttgattcataattcctaaggaaacccatgcatggatgccggggaaactcagttcctaaagtgcttgctttgccagccccggggcctgagtttgatccctagaacccacactgacatgcctagtgtggtggcctgtgttcctaagcccaccactgcagaggaagagacagtagattcctggagctctctggagagccagcctggcctacttgtgagttccaagtctgtgggagaccctgtctcaaaacaataaaagtgagtgctgcctgaggaaggacatcaaaggacagccagtggctctacaccgtaaccacatatgcatgatacatacatgaacacgcacacacaagcacgtacacacgcaaaaaggaaaagtcatgtacggtaggtatgcttggtcctccttacattttgccttgaatctatttatgtcacaatatattatttatgtagaagtgacaggaaaaatggaggtagatgctgccaaaacacactgcacagctctgagcctgggctctgattcctattgatttagtggtggaaacagtgattttttttttcagatctaaagcccagagaagataagaacaactgaaaatatattagcagcaataaatttacttgttctccaaaaggtttttaataattgttttaaatcccattttatgttgtctgtgttgggattgacttaggcctctattccaggtttgtggagggagaaaaagagtgtgggagcaaacgacagacatgccactcaggaatataaataagtgctcttgctccgagtgtcacctatgtgacggaccctgctgtcctcctttcagaggcaatgtagctgaggttctgaggcatggagcggtgttcctcatggaagctatcgagaaaatgagggcaatcaaggaagtagatctgaatgtgctcacgaagccttccaattccacttcagtataggttccaactgattcgaggcttggaatggtggaaaactgtgctacttaaactaagaggaaaaaacatgggttattcactcattcattcattcattcattcacccattccttaatctattgaacactttttgtgaggtgcccaattttcttcttttgaggctggccttgaactcctgaccctcccgtcctcacctccctagcactggcattacaggcgtgtgccactgcacctagttttctgctgtgcagaggactggacttggatcttcatgcatggaaagcaaatactcggccaaccaagctgaatcttcggcccttaagcttcatgctcatcagttccaaatcaatcaggtgacagatgggtagcccaatatttgcctggtgtgcaggggaccctgggtttgattcaacaccatatatatatatgcatgtatcaatcaagtcattgacctgttagagatgatgttccagggaagacgctaaacaaatgaatcttaaagatattactgtgtcacgaaggcaaaggaagtgcagcattgagacacagctcgtcattaccataaacaaataactgactgagaaagtaaagcattggtatgcaaacggctgaccggttttgagcaacttaaatttacgactataagaaccaggggctggagagatggctcagtcgtttagagcactgattgctcttgcagagaacctgggtttgattcccagcacctgtatgagagctcactactgtctgtaactttagttcctgggcctctgacaacctcttttgggctcatggtgccaggcacgcatacgatgcgctgaggtacaggcaaaacactaataataataataataaataataataattataataataataatagtaatgatagtagtagcagcagtaatagtgtaactgaagccaagtgcaggcgattagttcccactcagcactgcagacagcagagggcttgctgaagagagggagatcatattggccgcagtgttgcgggaaggtctgaggcacagagactgaaaggtagatgggatgccgcggatggcggatgggagggagggaggtggaacacagcagtgaaaacagattgtctcctcgagacaactgaaagctcatttttttgctgagggttgctgaacatgacagatttaaagagtgtcagtttggccctcacagacccgtagcactaaatctgaagccccatccagtttcatccagctgatgtcagaagcaacagcactgggctaggggatgcctgcctccgtctctcagcctccacagatgggtctgcttttaaaaccaatgcaaacaaaacaccccatttaatgtgccccgtagagtatgagagctcagctgaggttctctcgagtggtcatccatcttccttagtgacatccatcattctctctcaggtccctcaagagcttgtgaaaagttggagctcaaatgagcaagcggccaggtgccgctgttatttatctgatgggaatatgggaagaaatcaagtttctttacagcagtggctgactggggacagcgtcgaggcaggctgcctctgaccttgatgtcactaagtgccccactcccgttttggtcagtgcgtggagatgatggtaggagtctgggacgcttggtgctttagagggtctggtatctttcagaagcagattctgctaagcagttactagaaaggaatcttccatccatgctgtatgatgtggatcagaccgccatcggaacaaagccaacttctttcgaaggttcccctgggatcctgcaactgttggcttcagatgagtctcattggaagttaaggtagctgaaacatgggaggaaactcagaatatgatttcaggcaaggagctggaggcgtggccattgactgttttaaccttcgttgattgagaagttgatgccaggacagggcttattatttaatcacaagaaacaattcgtcacattatttacaatttcaccgaagccatgccagctacagtgtcagaaacaactctatagagtgagggggagctgagttggacttcctgggctcaataattcccatggaaccttgtagcagtgtgtagtcctttttctccatggctaataatttactactaatttcttcttttcaggaaattttggggactggggaggtgtagaaccaggttgagagaaagataacattcacaagttcttgtgagtgatatatatatatatatatgtatatatatatattctatatatagtatatattatatactataataatataatattatatatattagttatttggaaatatttgaattcatcttgttcatcttgtcagaggcaaggcattttatgattgaaagttcttctttcaatgactgggtttttaatcaccagtcaatgagtttgtactaaaggcttagtgtttagcaaaggttaccttattgtctatcatgaggcatataagacattatatacagggtcagttttacttatgtctaaacaaagtctgaagaaaaaaatcccaagaaggtgccttagccatttaaagcacttgctgatcttgcagagaacccagcttctcttcccagcacctacatggtgccttaaaacagcctgctaactccagtcctaggagatccagccccgctcctggcctccctgggcaccagacacacgctcagcacacttgtgtacatgcagaaaaaacactcacacacatttagaaaatctaaaaataaatagccactaccaaccaaaggaagtcatcttccccaaggggagattgggcacaaggtacaaagaaaacttgtactgtcctcagtctcccccaccttatcatgtatttccctgaagtaattctaatcacccatgactgccaagcctaacccaaagccaagcagactgatgggaggtacaacgttaaagaaattcttttctatttggcacagggtctcaccctgtagcccaagctggccttgaactcaaatcttcccccttcagcttccaagctctaggatcacaagtgggcatgcaccaggtagagatgaacaaaaggaagacaatgtctgctggggctcaaggtaggtgggagagtattttaaaacagtacctcctttgtagcttgggtggaatatagcagactattagtcaataaacaccagtataaacaccctggaaataaagatgccatctttataattctcgtcactatgtttgtatacacctactcatttcaaaaatgtgatggcaatgtcaaatacagccagctgcattttcctacagtggagcccatcttagtctttaaaatttttatttatgtgtacatgtgggagcctgcaagagtttatgtgtaccacgtgtctgtaggagtctacagatgccagtaaacacacaattgtgggaaaccctgaaatctgaattatgggtgcttgtgagccctcacgtgggtgctgagaacccgcctgggcttctctgtgagcactgtcagctctcatagctgctgagctgtctcttcagccccatggagctcattttatgagaggactagatttgaactctgtgaaattctgcatctttccttttctcctaattaaaacaacactgtcatgccctgggtaggagtatgttgtttcagtgtactgttaaacttgtaaagaaaatgttaatctagtcataatctacatgaaatataaaagtgagtcttcccataggtagctaaatgattcttgaagtctagaactgtaaacattttcttatttaaaaagtaacaataatcaattgtattttccaactactctttaatcttaatttcaatattttttatttagagtttagataaacaaattatactttatattttgccgtttaatcttactgagtccctttggcagattaacaaatagcacagaaaagaatatcagctttcctgttttacatttttataaactatgcatttgtatttgactctaagctagaacaattaaattggaaattttgtgcatatcttatttaagacaatacaattagtgaacaaattttctggaacgaagtaaagaacaatagtttttgatgggatgtatacacaataactcacgatgaacatgtcttcattattcagctggacatcaccagccatcaaacctgacattcttttatgcctcacaatgattatgttcaaatgtctctgatgtttttaacagttttcagtaatataatatataccagctttgctcatgtttaagttttgtcattagaaaggtttaataatttcaagtctaagaagataaaattaatttttcaaaattatgtgtatgtgtgtgtgctcatgtgagtttacaagaaccactgtcatggccagaagagggcatcagatccactgaaactaaagccattggtagttggaacatccatgtgggtgctgggaaccaaagccaggtcctccacaagagtagcaattgctcagaagtgctgagtcatctctccagccctaagaaactatggatttttttttaaacatagctgctttttagcagggtttatagcttttaaatgtttaaacacatgatttatgggcctccactacttcttattctttttttttttttttttgagtgttaaacactaactgaaggcctattgacaaattaaaaaaatgtttatgaagttagaaaaaccccagtcaaagaaagggctggcctttacaataggaggaactgagctggcaggagagttctctcagctcaaccttgtcaactccacaaaatagttgactgcagaatcacctgagctgtccaggttgctatgtctttctgtgtctttgaccaagcacttagtacctagtgtgcaaacttgaatgcaagtgtgtggttcttctgcagtgatctaagtgctgaactaagtaagtggttcagagttcattcattgcttcaataaaatgagcgtgttaccctttgactattattttgttttgtgtgtggaggtgtgggtgggttcattcactcaacaaagctgtgttgtaaaaaacaacaacaacaacaacaacaacaacaacaacaacaaaaaaccaaaaaccaaaacccaaaatttgaagtgttatttcatacttactttgggtaagaagcttggtgtcagatcagctgtgaaacagccagctatagtttgtagttaattcctagacctatagaaaatgagaggacagtttgagcttctttcccactgtggagaaccttgactattattctctttaagctgttgagtcacctgccacacaaccatggatgctacaagaaggctggagacagacacctggacagaggagataacatcatcacccatgactcagacagtgacatggacttcttgttctcatgagttcttcttgtccccagtgggtttatattacaaccgaggaatgcctggattaggaaatcccaaccttcaaaagtggccgttccagctgctatcaaattcactcaagtctctccctaaagggaggatggagtaagttttcttattctgaacaacagtgctctctgtctcagaggtaggtattgcccttaatatccgtgattattatgcttattaaaaataattaaagtgatcttcactaattgtaagttaattggagaaaacaaacaaacaacaacaaaaaccgaaatgtacacatcatcagcataaacaatatcctggattggaacagaaggctccttgggtctgagtcttcatgtgatgattctgaagtatagacatgagtgagaaagagagagccttgcaaagtatcagagggatgatgttcccagaagtggatggggtaaagtaccagagactaggtgagtgtgttagaccttacatctctgtgcagagagtgacctgtagacaatttgaactgtcttggcagcttcagatggtttagtccatggttgcctggtcctatgtgtttgggaagaatacctttgtggcaaagttgtgtgacaggggaacttcacttcatagcacacaagaaacaggggaccaagggaccaaggacagtatgaccacccttgtggttcacttctcccagctaagaatgccctcctaaagttatcaccaggatatcaggtccccaacacataagcccatggaggcatttcatattcaaaccaggagtttgaactcttttggggacacaaagtaactggggggggcaagtagggagaagtgtgtaggaatgggttaggtaaggggagcaatagccagatcctgtaaggcctgagaacatggggaggggtgtggattcacaatgagcacacttggaaacggccggaggggttttattggggtgatttatgttccagctcttgctgttgtgtggaaacttctgtccttggaggggaacaaaagccttggtaagggaatgatttctaagccatccatgcaggagatgacactgactcaggcggtgacagctggacttgctgcatgatcagacacatagttgtaaatcatactgttggattaagaaatagagttcatctttcattataacacattccacttcggaatttccagacatatctcttggccctggtaagatattgatagttcggtcttgttttctcacttctgcgtgattgccacttgggcattctgtctctccccagagcccgtagtgttgctcactgatgaagcacttgtctgctctcactgctgtttcatcttcaggtcattgtcacagcccagggctctcctaccagcttccatcctcatctattcttattccttatgtgagttattgcaacttactcctattgatctgttgagttgccttttccagtcactagagagtgagtttcttgacagcctccttattcataattacactccaagagctcatggtctattcccggtcctcaacaaacagtatctagtcctctgggacaccaggtgggtgctatcctaaggcttggtctggtgttaatgcactggatcctcccaactgcccgatgaagttgagtccgcatgactcaccttttgtagatgagaacttaggaagcaccgagggcactcatctcagcttccagatcagtggagagctgaagcagggtgggtctctcccctcggtctgtgctcttccctggcccgttagttggcaatgaatggaccgaaacaatgactgtgcttactcctccccttagcgctcattaatactttcaatttgttttcatttggatcaagtgtgtccttacaaataagagaaaaggctaaatggctgttagctctgaatatagcattactaaaatgactgcgtggaaaagatgcctctttctgacttactttttaattattttttgagaatttcgtatacaagcactatagtttccttgttcccccacttcttccctccaattcctcctgcatcccccaaattcttctcaagttcatggcctcttatttaattatcatggtcatatgtgtgtctttatatgtatttgtcaatacagcctgctgaggtagtgccgctcaaatgggtttgggtttggagctgcccttttgagattggctgacctatcaaggggctcatccctgaggactgatttcccctctgtcagtagctgttagttgcccgtggttcttctaagggtggagccttgtgagaatcccctaccccttcaggaagtcacacatggctgctgctgagcctcattttacttgccaaagactcggtgtttgtgtttacctctcaaagaataagggagacaattttagtttttcagccccttattcactcatgtctacagaccatagggtgcttcgaattcaccaaattctactatctttaagctgccacgtttactgacaatagactctcttaaattattttatgatattcttcagcaatgaaaaaaaaagcaacctgtaaaaatatttatagcagttttctccattgatggctgtttgctgattcagtcacatgttcggtcacgactaggtacatctaagcaagactttcctcctatctatgggcccaggagcccctcatctcggcactgtgccaactcaatacctatttgttcaattcaagtaaatttgaccatggatatgatgtggtgaaaccatatgaaatgcagccaacttgggctggggagagagcttgatagcaaagcacctgctgtctaaacaccaagaactgagttcaatgacacagaacctatataaaaagcctgggtgtggtggcttgtaatcccagtgctgcagagatggagacaggtgggtctctagggcttgctggccagtcagctaatgggtgcgtgagagaccactgagaaatccgtcttaagaacatccagtagacagcaacagagaaattacagtctcatgtacacatatatatacatacctctccacatgtattcacacatacaaagagagagggagttacagagagagagagagagagagagagagagagagagagagagagagagagagagagagagagagaggcacagagagacgaacagagacagagacaaagagatacatgcacacatagcagccaactgctgcttaggctgtggctgtatgggaacagcggcagcatgaactgcctgtggcagggaaagggtcgtttccagcactattctcacgccaacccatcaacaccatgtttccactctgactccctggccttccacctttggtcatgctgtggctggtctcctgctcagcccctccagagtgagtcactgtgttgacctactttccaggctccccgccttcctctcggttcccagactctgacaggcattccccttccttggcaccgagcttctgtggacagatacctggtaacagccccgtcttggcatcggctggggaaatctcaccctcctgttctcctccatactcactccacatctcttttctcctgtgctcaccactgccagccctgatggggcatgctccaggatggaatgatctactttctccaactgccaaattcatctttgtttttacaactccaagtcgggttgcttttcagcaaccgtcttgcctattttaaatgtatatcaagctatcctgaggacacatatgaatgtatcccgccctttgaaatcaaacaaaccttacctgtatcacatctgcttcttgccaagagttgtatataccattgggtatctaccattgcctctctggcgtctcctacaatagtttggccttaatgtgtctgatgtggcctgtgtgttaaaggccagcctatggggctgttaggggttgatgaagcctttagatgttgtgtggccttctagaaaagtagatccttggggaagtgcactcaaagggcatatggggacttgcccctccctcctgcccaggataagcaggttttctccagctgccaagactctgccacaatgttctgctttgtctcaaaggcctcagatcaatgaatcagttgaccatggactgaaacctcggagataatgagcccaaacaaacctttcctctaagttacttatgtcaggtgtgttgttccaggcacagaacgatcacattcctactggatgagtgagcaaacaaacaaaaaccaagtgtgagccacatatacacactgatatcttctaattccaacacagtcactttctggaggctgctcctcttccccctttcactaaggcaatctggagcccactgccactgcctcctctctttaaaagataatattccaagcacactgggaaaagcttggaaaatttctgcttgtgtgaaattaaccctcaccaggattaatttccttctgaggaccttttaatgcctgctgttttcctgatctagactttctctttcaagacccaattatttcaaagttctgccaacacattgttagtccagtaatctttttcataagtgattgtgagaagtaattgttaaagaaaacataattagtaggttgtttattgaagcattaattccatagagccacatcagcaagagaaaaactgtctttgattctcttctttggtgatgatggcgataatgatgattgtgatgatgatgttgatgatgatggtgatgatggtgatgatgatgatggtgatgatggtgatgatggtgatgatggtgatgatgatgatggtgatgatgatggtggtgatgatggtgatgatgatggtgatgatgttggtggtgatgatggtgatgatgatagtgatgatagtgatgttgatgatgatggtaacaatggtgatagtaacaatggtgatagtaacaatggtgatagtaacaagggtgatgatgatgatggtgctggcaatgataatggttatgatgatgacatgataattatgatgatgatgatgatttgagacatgaaagttaaggcatattccatcctttagttttttaacttccatagtattcaggcactgttttgaactctcttttgaatttattcaaaggtcacaactttttcctcatgttaaaaagcacttggaatgaagccagctcataacattgaaaggttggaagaaatcttcaagtttatcccacataaccacaatcaattgtcctggactcctctctcacattcctgccgagagggtggtctggctgctggagatggtttgttctcagagcattaggaggccccttctttcattatcttcctcctcgttcctggagcaagtgaactttactgcggttgggtggctgaatactcctagggggttggaggtaggaactgcagcccaggccagctaagtccagtttgcataaaagtcttctttttctgtttctgggatgaaagcagctacagactattgcctgggatgcgtctgaatctgaattttatcaaagtgagctggtgagagcctcatgtgtcctcctgctgtaagctaacttctctgcatactttaggagcaacaagcctaaacaaaagagaattttcttacagtggtttgtgctagagccaataggaactgaagcacataccgtgtgcagagggatttactgaattttcatgcaagtcttgagatgttctgctcagtgtagtcccaggactagccctaagccaatgcaaccaccatgctaagtctagcctctttctttccatccctaatggctcacatttaataactgacactttacatacactgtttttgctgtcattgttctctcttgcactgatcactaaaataaatagatacagttttcatattcttttttaacctgtcagtttctgtgctagagctggaacccaggaccccacacagggtagacaaacatttcacaactgagccagacacccccatctctttccttttctttttcttttgaaactaagtcttactgagttgctcccattggctgtgagtttaatttctagccaagactagcttggaacttgcctctacctcccaagtagcaaggactacaggcctatgccaccagaccctgctctgtttcttatataattaatttattaaaagtcaacctcatctgtagaggactgaagtcatgtggtgaataataccttgcataaaatacttcttaatgagaaacaatgctcctccttccatcttcctccctccctccctcccttcctccttcccccctccctccttcctcccactcctgaattttactggtcaatattataaagaggggcactcagagcacatgaatacctcatccccagaaggattgtctgggaattcccgacagctcatggttctgtgactggtggtctccaagccggaccacagaaccgcactctttacaaagtcccagacgatgggtgggtgtggataggagactcctgactcactgggggtgagccggagtggggtgatgaagggcaggtgggaggggtgtttttgtcattgcatgtccgtctgtaacaggcaactgaatgacaagtagagctctggggtcttgggaaagtcagtgcttgctatatgtacataggtaaccacaaagcagggctgtttgggtggaaagccccaggcattccagttgggagcagccctggaagtgccaggaagatgtattactgggcctgcaatgagtaaggatggaattaacatgcatggagtggatttatcctctgtgtcatacttccatcaaagtccagactttaacatacgtgtttgagtttttcgtgagaaaatttgaagctacctagtttttcattgcttgtgagttctccctgaggaaatggaatgtggctaccacagaaataacttactttggtcagactcataagttcccaagctctctaaaatgttatttcttccgaggtagaatactttgttattgtggactttcacacgatacaaccttagtagagaaataatggcaccaaatttatagacagtgctaggctgtgagtgaaataatttcttttaagtaacatttcttgggctggagaaatgctcagtgactaagatctttggctaatatttaaagcttgggacccgagttctatttccagcacccgcatggcagctcaccactgtctataaccccagttccagtggattcagtgctcccttctgacctctgcaggtacacttagtgcacagacatacatgcatacactatccatacacatatgtttttaatttaaagaatgttaccctgagctggagagatggatcagcaattaagggcacttgttatgatctcagatagcatgagttcagttcccagcacccatgtcaggaagcttagagctacctatagctccagctccagggggatctggcgccctcttctggccccatgtgcaccttcatgcacatgcatctatacacacacatatgcatacacataaattaaataataaaattaatatcaaaagttcaaaaagtattatgctttgaacccactgatgaccctttctagaagattaaaagaaatatggcctgtaaatgtatatgtgtgctaagtttatgcttatgcaaaaatctgagaaataatattcatatacttaagcaaattatgtgttgttcatacatacacatgtgtgtttgggtttttgaaaacacacacatgcatcaagattgagaccttggtctggagttgcttggcttaaggaggggtaggaagggaggctcctttacttgacaaggcagttctcatgtcactccacatagacatcaggggatctgagattttagcgtcttctcaaaggatcattagccaaatttttatatcacaggcaggtgagagaaatacaaaccctctggccacatatcttactgtctgacctttttgaggctgacccatcacaggtgttggcagcaacaaaaccaatgggcacctagaacaagcaagactttgaagacagacagccttatgttttagttcctgtaagaaatgagcaattcaaaaaaatattttcttttaactgagttaaaaatagttgaaactgaaatagctcatcctatgaaacacttacgggactaaaaatgtgtattttattccccatccccctctttcttccctcaaaaaaatgtgttgtattagaggaatcaggccatggcagccaggatggaatgttaaccatgccactggatggcaaattggagggaaacttgcctttcatcttaattataggccggacaggggagcactctgtattctcctgcccatgagcagaggaactttcccagggtatttttcttctgcatttctgactcttattggattggaagcttatccatgtgacccagcagggtctgcttgccataataagtctaaaaatatgacagaaatgttttctttagtacagcctgtgagtgtcaaacagaaattcgatggctctccccctcctcttagggttctgcttcatcttttcccagtgaatgtctcatttctatagacccatttctctcccaatgctactcttctggtagattccataagctgggatatgtttgtccatggaatggttgtagaacttcatcccatgtccttttaaaatatagattttgaccaggaatgtaatctgatatagaataattgtagaacttcataccatgtccttgtaaaataaagattttgactgaggggggtgtgatctgacatataataattgtaggaatttgttgcatatccttgtaaaacacagattttcttctccatgcatgagtatgttcctaatgactcacctccaattggcctcaaaggcttttcctacagtggggatgtgttgcttttgagtcatgtgccctctgattagatgttctcagaagcaatgagttgcatctgaatctagggatggtcagcgactctctgtgtccagctaactggtttttgaaaaagataatgaagtgatcagaagcatctctttggggaagaaaaattgggcttaagacaatttgaagctatgtgatctttggtagattttatttccctacattatttcaccagaaaaatggttatatcaggttgtagcaaaaaaaaaaaaaaaaaaaaaaaaaaaaaaaaaaaagaagtatgagaatgtgtttggtttatttagcagtgttggggctattttaatgagaaagcctgtaactatgggttcatatgcaatctactaatacaagtagttgaagcagtgttctagttcatttccattaccgtgatagaaaagttccaggaaaagcagtttatggggaaaagttttgttttagcttacagttccaggttaccgtatgtcataggaaggatgtcaaggccccagagacttaaacagctagtcctgtcacactcacagtccaaagcagagagaaatgaatacatgcaagccatttgtttgcttgttctcattttgaaatctctatccttacacagttcaggatcctcctgccagagaatgatgggctaagtccttctgccctgataaagttaagacaagctctcacagatatgttcctaggccaaactgatgtagataaatcctcactgaggccttctttccaggtgattctaagttgtgtcaggttgacggttaaagccaaccactggggtagattacataattccacatataaagatgcatccaatgaggtgacccaaatacagaaaaaataacagcaactgcattttctccctcttaggtggatcctggctcatactgtgttcatgaataggtaaacagctgtaagatgggtcgaaaatttataaaagtggtaaagaattctgggtgatgaggaaggctggaatgtaggcaaaaggatacaccacatggctactgtaatctacttgtgtgatgttttcatctgtgagttcaatacaataaagcagtcttactaaaattgatgaccaaatctcagcatggaagtgggaggagggtaaggaaagtgtcccacccttacccaagtttctactggcaattaatagctgctggaagggtcagctttcttaacagtggaggtagccctgacaagttgaccatgctccagtggaagaccacatacctaagaatattttagaaatatagatttacttgatgagaagaagaaaagacacaaagttagttgggaagggaagggggtgtggatctggggcaatctggaaggagagtgaatatgattaaaatacattgtatagggttcttaaaaatctacacacacacaaaaatctacacacacacacacacacacacacacacacacacacacacacaccatgttttcattttgataagagtagtgtttcattattttgagccctagacaccatgtttgctcagtctgtctggaccagtagttctcaacaagggtcctttttggcctacctaccagaatacgtttggcaatgtccagagacgggtctggctggcataccttaatgatggttgggcatgcttaacatctagaacacagggaccatcaatgttgctataactggtctctgatgcaaaggcagtcctctccaacaaagacttttctgcattcaaatgtcaatagtgtagacatctgagaaactccgttctagtacaccaactccattgtctgttgtttggcctggaaacctgcccaagattttgaaagaaacatgcctacctatgaaaatatctctattcttcctttatcctaggtcagttttgaatgcttccctaattcgaacccagcattattggtgcttcaattagggtcttgggtttcttatgtcagctatctcccaaagaggttgagaggataggtaatgggaaagggacagatgaaagaattagttaaatctttctgatggtaaatgcatacacttgcccagaaataaagtataaattcaaagttcaggaggcttaatgccattctggaggcttagggaaaattttccacgctaattcatttccaaagaaagttgatattttcactgatttaaaggaatatatatatatatatatatattccactgatatatatatatatatatatatatatatatatatatggtgatgtgtagaaactgctctgtctgctgaatagctgcctccttcccccaaaccagtggatggcagacactagagatggataaagcaagggacaagtttgtgtaaacaaccctcatttaaagaaagataaacagatttatttttggtgttggacttaaattaaaatttctctttaattttgtaaaggtattattcttctaattctgtcaaagttttaacctcatagctttaaagaaagctacagaccttggcttttccttcttatttttgttttgattttgtcaaattgaaagtctatcttccattaagggatgcaaatgtacacacagacacatacattaaccaatagaacttctagcccatttccccatttctgtgtattcaaagtttttaagttaattctatttcttgctcacttcccatagtgacttttcctctgatgttccaggaccaataagtcactcactcactacagccaactaagagttctcttggggttcttagtctcactaatataaaaacagactcaaacagaagcacaaggatgattttattagagcataaaagatgaatggtagggcaggcaagctgcagatctcggcatggaggtcaccacaaagttaatgcaggacacgaaagggaagctttagagaaagatggaagaagctcaaagtacccaagaaagcacacttagactctgggcagcatcagaaagaaaagaaaagaaaaaagtcacactgctattggtgatagcaaatctctgtctactagtggcctgttcaaaaggaactacccatgcacaaacagaaatatagtaaaatacaaagcaaacatttttaattgtaaagtcaccatggctttatattatccaaagtctaggagaagaaaaggatgcacttttctgaagtggtctgccctgtgaacaaatgctacccgtgggaccaggtgtctgtatagtgcgccttggttttggctttggcattgactttggggaagtctgaattgtgctagttaaaacatgggttcctggctagggaaatggtccagcagttaagagtgcttcctgctctccaaaaggacctcagttcggatcctagaactcacaaccaccaaccccagctccagggaattcctcgccttcttccagctattataggcacttgcccaaatgtgtgtatatctacatacagatacaaatacacataattaaaacaaatctttaaagtgcattgtatcatgtcacaatgaggatggggaggtgtgaaaagtactagaattctgatagctcatattatttcttcccttctctttctccttcctttcatgcttgggtcttctatatgctttttaggctctaagtgagcagaaaacataagcatttcttgtccacttgtgatccactgaggacatgcttgggcatattatagacactcaataaacatcttgttcaggtagcagtaaagtaacaaatagtgaaatttcttcttcaaacatccagttagtttctgaaatagttaacatacttctagatttaaaaaaatgaacaaatatatgtgggctagacatattaaacattccccagaatatcctggctctggttacccaaagtcatcgctgggtcaggcattcaccagaggtcagaacttgcagagtgcttctttgaagccgctgcatgtggctggaattgtgagttactaataactcaggaacacttgatctctttccttctccctgcccagatgcgtcattttcttggtcctttaccttgagcccctcccgttcctccacagcagactagctggcatggaaatttgctcacatctgtatttcatttagaaatatatgcctaaatgcatttttttcttccttattatccccttttttcctcagtttttcgtttctctggccctgctggacaacccccaaccccaacccagggaaatttcttccaaagggagttagttctgtatctgtcatgcagccagggccccagattggagtgaattcattatataagaacaaaacaacaaagagatgaacagtattgctttcctaacagacgcctagtggccccactcttcagagcttcatttgttttccaaatccccaaggaaaggtctgagtcagcagaaccaatccccagggcgtcttcagcagcagggctgctggtcttggctctggggtcagcctagttattcagcagacaccgtccaggccaaggccaaatcagcactaggcacggccacagggctgcctaccaaccagtgcctacaagagccctgtctccagtcttggcacctcctggcccctgatctgattgagttgttagttcatgccatactttcagagtacgaggcatgagtccccccttccctcttctattttgcttgcccaccccccccccccccccggtttcttccttcccataatcttgttgccttcccctctacttccctccccgtcattttgtccttctttccttccttcttatttggtggcctttgctctctttcttggttatgagtaatccattcaagctacatttagagaaagccacggtgccctgccattaccaccagacagaagaggggaagtgcctaccacttacttcaaaccttctctgttctaactctaccacgacctctgtttctttgtgcacacctcggctctgggcaggtgtttgtttgcgcagctgtgactcacagctttgtcttcctgactctgcatgtttgcagaaaggacgattggttaataaacacagagccattgctaaggaccgaatgctgcgcctctcttccagctgacccctgtgtcatggtgtttggatggaggacttgggcaatggaggagacaaggaatagtcctcatcagtgggcttagtgcccatgtagaagagaattccagagtcaccctctgaggacagaggagataaagtgaactggggagcaggccctcctcaaacagtaatataccagcactctcaccttggacttccgaacctccaaactgggatggggtgggaggcatttactctgtttgctatcttattagagacccctagaatgaccagggcagctacagaatcaaaagccattaagaaacactgacaaacatggaatcatacaaatgagagtatttaacatggtggggaaagttaaagcagggaaaccagaagattagaaattaggaaaatgtttgaaactggtttcattgggaaagcactagtttatttttatacagtatttttatttgttctttgaaaatttcataccatacattttttaaaaaaaagtgagtctctttgccccagcagccatcaactgctagtagtttctcagccagaagtagggtgttggaagccccttctcttcccacactgtactattttttggctgtctatattttgtgcacacaactgaaaataccgtgcatttacctgtacacaagccatggaatgtccagagggtgccatttcacagccccctccccgtcccctggctcgctctttctttatactctctcttctgagagctcccctgagccttgaggggtgagggttgctctaaggcattcacagtctcttagtctcagcattgtgaacaataacagtgtcctccagtgggtctaggacagccttagagatagactttgaccagatttccagcatcaggcacaaattcgttcccgtgcaacaagcctcacagccagtcgagagagtgattgtttactcccagtaacggtcctgccacgattgcatcagcaggcacatcttgcctgcagggaaggattgtagcgtgcagcgttcagagctggataaaaacactgatgtcattctccaccagcagcctgggtagtggtttctagcaccatgaacgctggcctgcaaggagagagctcacagtcagctcaggatggatttctctgttttcttatagtcaaagtgcctttggcaataggatctgatcatccagttatgatgggactaagaccagtgacgatagttcgtttggggtgcctctgggccttccctggtctataactgatagggaggtctggtgatttgaatgagaagtgtcctccataggcacgtgtatcgaatatttggttccccggtgcaaaacaccaaggagggtggcaaaactgggtatggcagcctgaacttgtaatcgcagcactgagagggaagggacaggcagatccctggggctcaatggacgttctaggtcagtaagaaaccccgtatcaaaaccaaaacaaaacaaataaaagggaatagcaggcgggaggttatcttctggcccccacatgctttcaaacatacaaacatatgcaaacacacatacacacgcagacacaaaagttaacaggttagttgtgctttttctttttttatgattcatcatccattccttcatttatagtcagaacaagaacatcttacaagttgatgaaccccttaatactctctctctctctctctctctctctctctctctctctctctctctctctctctcacacacacacacacacacacacagagcttggagacgagagtacacaactatgcccaaagtaataatttatgaaatctgaaaacctttaagcatagtcaaatagctacataattatttccatctcaatatctgaacaacagaacaacatctcttttaaaggagacacttttattatatgaagaccacatgaaatctagtacctcagaacaaatatgacttctgagggaaggtagctgtttggaagggacaagcgacctaaaactatctgcatttgtggaaaacaagcaatttttctttcccttggagggccttggggaaaatgtgtctccaatcatccctgtggggccagcatttcaaagacaacataggaaccctgtgtccttctcctaagagttcattgagcccaacagtcaccgtgtccctaaaagtagctgatctcatgccctgtgggcaccaagttcctcattcctcaaatagtagatgtttccagaagctctgtggctgaggctgactcacctccctgcctgcacacccctgggagaggcccttagacctaggcagtcagtgagagttagggcggcctctcttgctatcagacagatccaggaatgcggatgcagcagagagcatggctcttaaccctcttgtggttgacatgaatagcattctttctgtcacggcagagatgaagaagccaaagtcttcagcaattaaaagactccagattatgcttgcagtagctgttgaaaacatttggctttggggtacaacctttttaagtctagcgtttttgttctaaagtttatgttgcaaaataaagagctattggtgatttggatttcattaggacagagagaaccaagttaccatagcatgatctccagaccacagtgtgtttaccataagaacaagaatttgacagtcatttctatttgtgtactacggaatagatgcaattcatatttcacagagttggaagcctctccattttcaggttttttttttttatatctaaaatggataggatagtacagcacacatagcctgtctcatcctgttttcctttggaattctgcagcatagccagggcagtgagctgagactggattttttttttttctcataatgtgtttctttctttgtgttcagttttgtttgatttttacgtgggcacccacctcttccaccatgtccctgaaacaccttctcctcaatccctttcattaaagtctcaacagtatctcctacctttccattcctcttgtgctccaatatgattgtcttacttggtctgatccactctctacatacatgttttaatggtgtatgtgctaggaaaatagcacacacatttcaagtgttcattaaattcccattgattgaaccacccataaagcaaatcaagcaagaacttttgtataccatttatctatatggggagagaaaagtggaccgctgtatatgtgtagacatcagaggacaacacgtgggagacagttctttcctactatgttggtcccagggatagaatgctggtcatcaatttcagtaggaagccattttacccactgagttatcttgccaacccactgtggagatagctccatcattaaagtttttgctttagaagcacaggccctgactttaatcctcaggacccatttaaagcttgcagtcctaggtctggggactctgatgatggggcagggaagggggaatccctgggactgagccagtcatcccaggctaatcagtgatcccagactatcgagagaccctgctctaatacaaaccgaaaagcaaacaaacaaaatccaaaaccaaaacaacaaaaatgcacaaaaccatggtgcatagtcccctaggactgacacacatacatgtacatacattaacactacacacacgtgcaccctcacagcccataacagcaagggagagcgcacatggaaggaggcaagagccttatttgtgggctgaattcactgcttctgtgtaagacagatactactgtacgacagttccaaagccacacacttagcttatcaccagatgaacatggaactggcaaatttttaaggtgaacatgacaagcctctcctctttctatgaagttgaagagtggtttgagttaggctggcctgaaggagacaggctacagtgaccgtcggcatgaccctgataaatgtgcccacagctcaagaatcaggtggacaacaatcctagtttgtctggattagtacacatttctgtgatttctttaggggtaattatttgtgccgttttcctactctcagtaaagttcatagccggaaagtaatggtgacagttttgtgggggttctgtacatgtgtctttatgcccatgagcgccccggtgattcctcccattttatttctttcctcctaataccacagaagagcagcttcctctctgatgaccacattgatttacaccagtagttgttactttgcatttaactggtcaagtatcccatctgtagttcttcctcttattccatcatttagaatagactacagaaattatgtcattaattatgcatggaaaatgaaggccaatttgtttggtctcataccagagagttgtttgatcttgccattgttttattcaaacctctcagactggagtggacacagatagactcttgttcagaggtgcattctttttatttggacttgaccagtgacagatggctgtgaattcagaggatgggcacaaacagctgaacagaacagttcttcctagacagctgctgctgtctaaattgtaagttgggtcttctcagtttaaagatacagttaacaatagttgtcattgagcgtggcctggggacagatgtagagaattagtggcccatagagagctcatcagctttcccaagcctccacactgaccctgctggaaaaccccaatgttcaaggcacagacaggacttttctatttaaaaaatatgattagtccttgaatttggaaatcatggcttcatcatgtagctataaggatttttcctgcaactggagtaacacttctggggacagagacactcttttaagttctggagactcccaggaaggtaagggaatggagccaaaacactctaacaaagcaagcaagctgtgtcccctcctcatttcctgtctaaacaggaacccaaaatccgtggagaccttttccttgttccttgaggacatgccttatttccagaattgtactttctattctatgttttatggtttgaaagctcatacacatatgtaatatgtgttgatcatattcatttcctatatttcctgctccctccctcaggctctgcctgggtcactcactctcatgtctcccatctccatctcacgcagtcagttagtgctgcccataagctagtgttcagggtcatcccctggcaacctaccaatacccccctcaaaggaaagagacttttccctaacagccatcaaccgccattagctttgcactggggtgggacattggtagaggtccccttccacgctgggcattttaattcttgattttgggggagtcttgtgcaggtaaccaaaccagttgtgtgtttgtgtgtgcaacagccccaccatgtccagaggacaaatactttacggcattcctctgatggtcaaatttattctacaccctcctctgttgggttccctctgcctcatgagggtggtggtttagaagtcctatccacatttgagccctcacttgacagtctttaattcggctactgggattgattttgtctatccaatctggctttgtatttgaatacacatttgctaatggttgtgtgccaccatttatgagtgctggccattttctggaagatcagtaagctctcttaaataggatatctctccagccttgtcttagggtttctattgctgtgaagagacacagtgaccatggcaactcttataaatgaaaacatttaattggggtggttcagttacagtttcagaagtttagtccattaccttaagagcaggaggcaaggcagcatgcaggcagacatggtactagagaaggagctgggagttcttacatcttgatctacagacagcaggaagtggtttgtgtcactgggtgtaacatgagcgtaggagacctcaaaagcccacccccacagtgatatactttctccaacaaggccacacctgctaatattgctacttcctgtgagttaatgagggctaatcacattcaaactactataaaccctttattttgcttaatttttaagaaaagcttccataaataaattttgttcactgtttagactagtttggctctgactttttgttgcttgtgtcctgaatcactgcaatagctgtgggttttggtaccagcttttgctaatggttccattaatccacatttcaatgggggatttgctgaatggagatgtttcgagaggggcctggctgagtctcattccagagcagggagctaacaacctttgttttatataaacaggatttacatggcttcaggttctgctttttgtgtctgattagaacttgaaggtgttctcttaagggccaacaagaatgttccttgcagcaggcttagaatgtacagagacagacagggtaagtggtaaatgcctgtcagagcacttattcagttcccactacactgagtatagccttcatctagggaaacaaagcagacagagccttgtccacatggaacttcatgtgacaatccatttactgatgcttctagaaaacaatgacttcaagcaagtagccaaagagctccaaggatctgcttgtctctgtaaacagaccccagtgctgcagacacagttgtgcatctatgcttgactttttgtgagagtgtttgggatctaaactcaggtcctcatgcttgtggcaagaattttatgagcttatctgtctcctcagatggcatgagagactcagaagcacaagaaggacataattctcttaagatctacaaaagagatagttgtgggttcactgggacatgtaaggctggacctcagtggggcaagaagtgttccagtgtggattacaatcttaaattcaagccagaagattgtcttatggatcatgatatgaatattcaagaaagagaagagttagagagaactagaaccagagaatcccctgacctaatgtggagttcttgtactcttgtagcacagaaatgttactctttctacttcaagtcacagttggtaagaaaaaaggcagggagtgtgtatgtgtctatctctctcactcactctctggtgtgtgcgtgtgtgtgtgtgtgtgtgtgtgtgtgtgtgnnnnnnnnnnnnnnnnnnnnnnnnnnnnnnnnnnnnnnnnnnnnnnnnnnnnnnnnnnnnnnnnnnnnnnnnnnnnnnnnnnnnnnnnnnnnnnnnnnnnnnnnnnnnnnnnnnnnnnnnnnnnnnnnnnnnnnnnnnnnnnnnnnnnnnnnnnnnnnnnnnnnnnnnnnnnnnnnnnnnnnnnnnnnnnnnnnnnnnnnnnnnnnnnnnnnnnnnnnnnnnnnnnnnnnnnnnnnnnnnnnnnnnnnnnnnnnnnnnnnnnnnnnnnnnnnnnnnnnnnnnnnnnnnnnnnnnnnnnnnnnnnnnnnnnnnnnnnnnnnnnnnnnnnnnnnnnnnnnnnnnnnnnnnnnnnnnnnnnnnnnnnnnnnnnnnnnnnnnnnnnnnnnnnnnnnnnnnnnnnnnnnnnnnnnnnnnnnnnnnnnnnnnnnnnnnnnnnnnnnnnnnnnnnnnnnnnnnnnnnnnnnnnnncgcgcgcgtgcgtgcgtgcgtgcgtgcgtgcgtgcgtgtgtgtgtgtgtgtgtgtgtgtgtgtgtgtgtgttgtgggaggcatgttaagcagacaataaaatgagctccatcttcaaccaagccactcctgctgagtgaggcattttcctcaaattgctcaatttcctcaaaggcacaggacactatggctgtagttagtaaacaaggggctgtgaggtgagcagagtcacacagacatgcttctaggatacaatcaatatttcctggaatcgtgaaattacgaattgccagagttggcttcagtaccagggtatggcattaaccatagcccatagacccaaagaaaataggccagcagtatactaactttgcaagtgctctaactgtactgccaaaatcaccatggggaaagaaagagcctgttgccttctttagagtctaagataatccccaggattgaggcatcacattcttaggaagtgggattctcaaagaacatcctttcccaagtccactccagagaagacaacacacaaggggagtctgctcatatgaagagctaagagccttctgagcagctgaccaagtgatgccttggccagcagaatatgatatgtgtgtgtcccgctgacttctctgcttcttcttggttgcttttccaacatgggagctgtttcatttgtccagttctctgttgatttttgttaacggaagtgtcagggatctattgcatattgtcctggccccatgttcctcagaaaaaaagagactgaaatactagaacctttcaggttctattacagtgtgttaataagctcaggagccagattgagagacaggaggagtctgtcaggaaagaatggcaagacagtaaacattgctgaactggccgatcagtgaggcagtgtttaaagccctgaactcacaggactgtctactgagaagccattgcaaagtgtgtcctaggacagcatataggtgagaagagagagactggggaggacaggcaaggtttgaattagctccaatcacctaagagtctcaagtctgccttcagagttctctcctttcacctttctgggttgtatgagttaggattcttagagaaaaatatgataaagtacaaatcattaaagagtatttgttccattagcttacatcagtggttaacaacccatgggtggaaactcccacgggggtcatgtatcagatatcctgcatatcaattacttatactacatttcataacagtagcaaaattatagttaagaagtaagtagtgaaataatgttatggttggagggtcaccccaacatgaggaagtgtattaaagggttgcactgttaggaagattgaagaaggaaccactgccttacacagtacagaccacatagtcccacaatggctgtctgcacactgcagaggctgagagcccagcatccagtgtacaagaccaagtatttaagcagttgggactcaaaccagtgcaactgggatggaagattcctgcagagttcctggtcttcagtccacattgaaaaaccaagtggatatgagatgtaaagcaaaggataaccagactacaatccacagctccagagaagctagttaacaaggaggactctgagagggacacatggatcaccttaagaagtgaaatttggttagatctactgggtaaactcactgtaggaattggtaagggggaggggaggtaggatgagaacagaagggaatgagatggccaaggcagggagggatgctttgaaagagcaatggaaaagatatcttaatagagagagccactatgggcttatggagaaacttggtgatagggtaaatccacaaggaagatcccagctaagattgctagcaatagtggagaggatgcctgaattggcctgaccctgtaatcatattggtgaatactccaactatcaccatagagccttcatccagtaagtgatggaatcagaagaagagatccacaaacaagaaccaagccaagttctggaaatcgagttgaagagcaggaggcagggatacatgagcaagggagggcaagatcatgatggagaaatctacagagaagtggaaccaagcttgtagaatctcatgaactctagatctatacttgtggagaacccaggggattgaactaggccctccatatgtgagagacagttatgaagcttggactatcagaaacggacctgtggaccttaaatggcagccacaccccttagggtgtggcttcaaacaaacagaagccaaaagagaggagcttgaagtgtgacttttctttgtgagctttttctgttgggtcagtggatccagtaggatgagcagggaaattctgcagtgattctttgtatttttctgtgtaattttcaccaataagcacccatttatcatttatcttggatatagtgacataattacatcctcaccttcaattggcacccaatgtgggacttgggtggttccctgcaactgcctcctgataggcttacagcctgtggctcttgaattttgctctggctgctgagttggctgcagagtttctgctgcctgtccagggaaaagccagtacttcactgtgccttttgagtgccttggatttgcaggtgcatgcctgtgaaaagtagaccaaggcagtgttttttcttctgctcaatttgcctgcctggcttcaaagtcccctatgagccaacagtcacccagatctccaagtgtcagtgatctacttaaggtaaattgagtacccatagcaatggccgataatattacaatatagaaagtgaaaaaccttttggtttcttatatggatgggattttagaagagacttactacatacctggaaaatacatattagtcctggtatcaattagcttcataatccatataatatcctttaagaaatagtttgacaatagagctaagaatgaggaacttgcagaaaccatacaaaatttacaaaataataatgagagcgtagggacaaaaaaggattcagaacattgaaaatggtaatgatgatttaacaaacagaatgcaaaaaagatgaaacataagattgaaatactaacagaaacctttgttccatgtctgagactaatgacaagctagaagatagaacattgtttttggaaggcaatttccatgccattcagataatttctaaggatgagaatattatatctttagaatcatatataaatgaagagaaaaggaaactgactgatttaatgaagtgtctagaaatttataatgtccaggggattcaaatgctcaaggaaacaatagtgaatagagtacaggccatcgaacaccttcaggctgatacaccagaagcagaggtacagaccacagagagtgaaactgatttaacattaaaagtatcttttcaagtcagagatggcctacctaaggtcattatgtcatcccctatggtttaccccattatggtcactgaaaaaacaacaagtaaaaaacatccaaaaggatttgttgaatgtcattgggagcaaatatgcatgaaagatttaaaacatataaatgaagcagtagcctcttatggcatgcattcaccatatgtgaggcaattagaatcatgggcaacaagaaatagggtgacccccaagattggggacaattgatctcaactgtcctttcaaattaaatggagggaagacaaagcacttgaacttcatggtcaaaagaaagattataaggctccccaagaaaaaaattcttggtgagggtctttatgctgatgcagagactcaagctgcatatggtgaacacatcttgtccctagagacaagccgtagagaagctctaaatgcttgggataagattcaagaaccagggggaaagaattgagtcctatactaaagtgttacaagactcaaaggaatgttatagtgtatttttgcaaagattgacatgagcagttcaaataggggtagcagatctagaagctaggcgattactcatagaatctttagcttatgagaatgctaactcacaatgcaaaaatgtgctttggcccataaagatcagatcagcaccattgaatgaatggatccttcacatagccaacattgagtctaatgattatgacactgagaagccatctccaaaggtatgacaagacactaaaataccaaatgctttaattgtggtagaatagaacatctgggaaaaaattgtagacaacgcattcctaggaataatgtttcttataggaataaccaaacagaaggccccaatcttctggtttatgcagaagatgtggctaaggctgacactggaccaatgaatgtagatccaccagggacaagtaaggaaactctttaccattgggaaactccttggggggatctcttgaaggcacctgtgtcaaaaatggtccaataatttcaagtcactgtagaaaacaatcctccccagaacaattagaaaatccaatgcctagtgtaaaaaatcataccactctggatggtctattagctttggatgatgaatcaaacatacatggagaaaacacaaaacatatattttggaagacttctataaatgataaaagaccaggattaagagtacaaataaataacattttgctaataggcttagtggacacaggggcagatggcctctgcaagaggtaaacattcaattcttagtgattggaaccattaactcgggtaaaacagagcacacaagatgaatatataatgccagaaggacaaagaggaaggatgaggccatatgtggctgatataacaataaatctatggggctgtgatatattgcagcaatactcagattaacattcctcaactatcagatatgagccataaacaaactcatggttgtggaaaaaatattgtaaggcactatagaaaacagacaccaactatccaggctgtacaaaaatagaatacaaatgccaaactaacagaggaacaaaaagctctacccttaaagtggctaactgatgaacctgtctgggtggggcaatggcctatgacttttgagaagctagaggctctagaaaagctggttcaggaacatctaaatgctggacatatcgaagaatccaccagcccttggaattctcctgtattttttatttaaaacaaatcttggaaatggagaatgcttacagatctgagaggcatcaataaagttttcagctgattggctctctacagcctggaatgcccttaccttctctgatacctaaagaatggcctattatagttattgatgtaaaaggtcgtttcttcactatacctttacaagaatgggataagtgcctaattacaattattctcagccagtcaagagatatcaatggaaggtgttgccacagggatgttaaacagccccaccctgtgccaaaattttatgcaaaaaacattggaaataattcataaacagtttccataatctgtaatttaccactatatggatgctacattgttagctgattctaaggcagagatgttagtaaaaatgtttgaggaagtaaaggaagttttacttctttggggattacaaattgcccctgaaaaaatacaaagaggagattctatcaattatttaggacataaaataggtctacagaaaatttgacacaaaaagtacagatcaggaaggatcaatatcagactgttaatgatctttaaaaatggctaggatagattttccagctgtagactattaatggagtagaaagtcataatgtaaaaaatttgaaaagaaaaccctaaaaggggacaagaacttaaatagtctaagaatattatcatctgaagctgaaaaggaattagaatgggtagaaaaaagaatactagaggcacttttggaccgtgtggatccaaagcttcactgtattctgattatattgccatctagggaacacccttcagggattttgatgcagagggaagatataatattagaatggatatttctaccacataaaaagaataaaaaattaaaaacatatatagaaaagatttctgatttgattgtaaaaagaaaattaagactttgtcattgtattaattcctccgtgcattgtaaggaaaacaccaatctctagagaccctagattctacaaagatgcaaacaaatcagataaggcaagatgtaaatcaggaaaaatgagtaaagtgattcaaagcccttctaactctgtacaaaaggcagaattgaatgctgttctcatggtacttacggattttacagaaaccctcaatatagttactgactctcaatatgcagagagtgtcatcttccacattgaaactgctgaattcattcctgatgacacataattaacttattgtttatataattacaagaaataatcaggaataggactcatcctatatatataacacacatcagatcccatacgtatctgccaggtcctctagcacaagcaatgatgaaattgatcgtttattaataggaagtgtgctggaggcctcagaatttcataaaataccatgtgactagcaaaggttttaaaaaggagttttccatcacttgtcaacaaactaaggaaatagtaaaaaaaatgtcctacttgttctttctataaccaaactcctttaccagcaggtagtaaccctaaaggtatacatagaaatgaaatttggtaaatggatgtgtttcactttgcagaatttggaaaattaaaatatgtatactatacaatagacacattttcaggatttcaatgggcaactgctctgagctctgaaagggctgattctgctactacatacctattagaggtaatggctattgtgggtatatctgctcaaataaaaactggcaatgttccagcatatgtctccagtaagttgaaatagtttttttttttttaatattataacataaagcatgttactggtataccacacaatcctacaggacaagcagttgttgagagatctaatcacactttaaaggaaatgctctataagtaggcagggggaaccaagtccccgtcgtgccccccccccccccccgccccccccccccccccccccccccccccccgcaacagattacataatgctttaataaccttaaactttcttaatgataatgaaaaaggaaaaacagccacagaaagacattggacaatagaagatacttctgagctaaatcagccagtgtacttcaaggatgtaatgacctcaatatggaaaccaagatatgtgttatgatgggataggggtttcgcctttgtttctacaggagaagaaaagctttggataccatcaaagatgatcaagatctgatttgaacaggagaaacctcttgatgaagagagatgagaggtcatccaccgaggtatatcccaagagttgtatggagacctcacaaaggtagggggagtgttctgttcttgtcattacaggaaaagagaaaacacctagcttcaagaagccaaaagacattggacgtatagatgcctaaagaagaaaggatagctacccagaaagaaccatcaaacaaagaagaatgtgactttcaataactattcttgttgaaagctttctatacatagtctttatcttctaacttcttagtactctgctagttccaattcatgtaaaacaaatgctgactttggagttggatttggctttccttctctaaattcaaattgttgcctttcccagtatgcatacttataatagttgaactttcgttgttgatattaatgtttaagtcttccacaatgaacaataacatttcctaacagcaatcattgaagtctccagaaagaagatggggacccatttcgtccattcaacttgattcaacttgtctctgaactagaaatcacaactctaagactggtttaggaataatactgctataaacaattccagactagcttgctgaaatggtgccacttgttataacactctagccagaacttcagataagaacttgagtcaagcatctcctgccactcagagatagctacaaatgttacagctagtgcactcgagattttctgttgtcttatttttttttttctacaggatcccatagagtcaccatctccccatttcagcgggaagtaactctaaggaaaacaccttttcttacagttggcatagggcattttggtgtcccccccccaccccgctcatcactgaaaaggggataattattgtgtgtggaaggtgatggtaagactcaggtatctcttatagaagtttagtggtatggatgggaagggtatggttaggatgggatatagttagatttattttagcaactattagctatagataaattgatagattcttgtatgttgactaagtagggacttctttctgtttatgatgttttgcacaaaaatataaaactatctttatgtatatattttgtatattgataaaacctaggatattttattgtattgcactttacagttctacctctaaagaaatttcagtctatccctgtcacatatatatatatatatatatatatatatatatatatatatatatattgaagtcattatccttgcttaattatgttgggaagctttgtccattgagcaactatatttctgggaattacagattatagttacccacgcttcttatacttatgaggttagttagacatagatatttgatcttcaaacacttgaaagacctgcagactatggcatgtaaatgttttaatattagtactccattgacacaagacacaattgctcctgatagcactgaagacactccatctggagttcattctctccttggctactggcctcttgggcaaagaactacccccaccttggccgctgaccttggacatgtcctaactgagcttgcaggagataaacttaaagaagactgctgaactctgccaagtcagggtaagacagttttttgatttccctgcttctgagacagtccatctgatactttaagtcttatccagagctggttgccccgctgttgctgtgagatcttgggtgactgtccaggtagcctgcagtttctgtcttcatttgcacctttggaagtcacatgcttgcacttcctgcctaccctaatattgttgctttccttctcaggtctttgatggggttgaagactagacaatcataactatatcctctcttatcttagataagatttagactttccagattaggactgctatcagagtaatctctgtcatgcctttatcctgatacttgacgagtatactggacatgtactatatatctattgcttaatgttgctcttgctgatagcaggttttagtttgtgtatgttgacctttcctttcttggagtatacttgaaatttgttatcattgaatatactttttgcatcaggcttaaaatcttctttagactaaaagaggaattataagcatctggtctgtggacctgaaacagtgaccacacccttttgggtgtggcttcaggcagattgaagcagaaagagaggagcttgaggtgtggcttttctttgtgtgctctttctgttgggtcagcgattccaggaggaagagcaaggcaactctctggcggttctttgtatttttctgtgtaattgtcctcagtaaacactcccttatcatttatcttgggtctagtgatataattacatcgttgccttcagcccctggcagtaggacaatgatacaaacttggtacatgagctagcttgttggagtacactctctatggtgtgatgccatgctcagccttaacgcatggcaaagggtcctggctcttgccccaacctattgggccagactatgttgactcctcatgggagcccttacccatgaggaggagtggtctgggggtgggctggcagagagacaaaggtggtaggaggaggtaagggggacagctggaggaggtgtgagagggacgactgtggttggaatgtaaaatgaaattaaaaaataaaagaaatgaccacaacctgttttttttttttttaaagaaagaaaagccaaagaaactgggttttgcagaggatggcagcagctgcaagaacagcattaagggaagcagttgcagtgttgatggagtcagtagttagaagtgtgcaggcaaaagacatatctctatgtctcagccgccaccagaaggctctgcctactttgggggagggtctcccccttagttaatccttccaggaaacactctcacagacccacccagaggtgtgtctcttggttgatcccagatccagttaagtaataatagccaagactaacaatcacatgagtgagacatcgatgggctccaagaaaggcttttgtggaaccccatatcttggaagcaacaaggaagccccaaggcggaagtggtgggaggtggtaaaaggctgtgcccagatgaggttggctaaatagcacttacacacaggatggtgataacagaaggaaaaagagaagaggaggaggggcacctttctaaggcagtctaccaagaatctgagaaactaggaatagtttgtaggacatcaggggaattattggtcaagtagctcttggtaactctagactcaggttgactcgccaactgtgagaatttagattgtctgttggagaggctttacattgtggaaaaggaaatttgagaacatgtgtccagaataatagtgtaagtggttggtagttataccagtagctcccatcagtatgcatctctgtgccatttctgtaggcttgacccctcccttttcctttccagagtgtacccaatacctctgggtaccacaggggttagctgagggcaatcggagcacaaacgatgtaagacatattcccctgcaatatgtgaaactgcagaagcaatctgattaagcatcaagattggtctcagggtaaaagcagcttatagaggagccaaggagtcttcagccaaagaccagctgaagccgtgattcatgcccttaataagttgggtctgaggatgaggctacatacaatccacatgaaggcgtaggttgtctctcccattcaagatagttcatgttggacaatccttccagaaaacaaaagcactgtagtcattgtagttgttggtgggtcaaagctgaagacaatgttgtctgggctatgaacctgtaagcaccatatttaaggagtcttcgaagtaattcaggatgttgaaaatgaatcacagacaatgtttgcaaatgacccaattcaatcagggtgactgacccattacagatttctgatttatttaccacgtggcaatataagaatatgttcttaactagctgtgataaaactaagtcaacaaaatttttatatataaaaatgtatgtgctaaagagatataaacattgtatcacctagaaatgactgcttctagtatttattttgcaatgttcttggtctaaaatcccaagtcttgaacacctgcatcatccccttggtatgttagagtttcaaagagccaccaagctggtccatattcctttgtttcaattctgcactttccaaacaactttcagaaaaggaaagcacaagttagcttgttagcttgtactttatgaaagaaacttcacacacacacacacacacacacacacacacacacacacacaaccatgcatatatatggcagatcaggtggctgtacaaatttgagtcaatagattatttcaaaagagaagacgtgaacttgggtggactgggggggggggtgaaagtagacttggaaagagttagggggaggagtgcgggaggaatataagccaaacaaatgtatgacattctcaaagaattaaataaaatattgttgaagaggcaatgacaacaccacgaaagaataggctaattcggttgcagacgatgtgttcagggaatcatgggtccctgggtttagacatgatacaggccccagaagactgagggcatctgatgacaggagaaatcttcagactttctctaaaacagtcatcattagaagctcccaagtgaatggttgctggctctttacagcatacatagttaggtggtttaaaacttcgcattaatcaagcaatggggcgtaaggaaagtttaatttggctacatttctgtttgattggatggagaaaaatggaaataaagaaagggccggaaacacgtgtgagagacaggaaacttgctgtgattagagccaggaggagaggggccagcagtggtaattaggaaggaaagaatagctgttggagaccctaacaagctcaaagtgacagcgcctacagctgctggcagtggtgggacaggaggaggggaatgtcacaggtcatttcaaggtgtccatctgaacgctgacagagccatgatgcttggacagaagtagggaggtctggagacagcggatgcatctctgactgggcagctgtgtgctgcagccgatcattagaaatggggtgaaatgaaagggtccccttctctctgcatcaggagcggatgttataaagtgagggggaaataatgcatatgtgctatgggaattggtttgctcaaatgttaggatccgggtttgtgttattaacgtctgattataaaatcatatgttttattttgagaaatctctgtctaaacaatctagctaatcagtcagagatgcatcactgcctgtggcagaaatgacactgtaatattaatgatgacccctgcccccaatcacctcccagtctgtgtctgtgcagatgttaaaactgaacttatgtgttcagtaatctgatgaaattcaaagtccttgggaagaaaaccccaggaacacgagggagttaaagggagtgatgaccacattcctgtccacacttcagaggttgtctttgggttttacatattgtgttgcttgtttctttggctggatttcatttaggtggggcttcccgtgcagatcccagcccaaccaatcacagctcttccctcccggcagtttccactccatgtgtatggcctcttgtctttctactctcccaccttgtaggtgatcctttcctccctccccctccctcccctccccctccctccttctttattattttatttcctttctctcttcctttcatttccatcttttctcctccttccttttctttctgctctttctttgttccctcccttcttcccccctcttccttcctgtctccctttctccctccttccctgtcttctcccttccctcccttctgcagtacagtctttgcacatgctgggtgaactgtgtgctcattacccctccatataggaatggcctgttaaagggttatgcctcattaaaagcaaagcggctaaagtaagataaagggtataaaactatctcttacaaggcattttaaacagtctttgaaagggcctcaggctttccctgacacatgtgcaacatccagcttagcgttggcttcttacgagcattgggagaaaggaaaatgcattctttgtttgcaaaacccacaaagaacaaattataattgcatcctattatccagcctctttagcttctccaagaacttggggtttaaataacagaattattttagccctggggtgggtggagcttgttataagtggcgacaggtggaaagcacgctgaacaaatgaactgaatataacctgacacgcctcttggatttctagtgaaaatcccacatacatatttgatcattttaagtgtggtggacttgttcactgcctcggacacaatgcaagagaagagataaatgatgtgtcttctaattaaaaaaaaaaaaaaaaacaaagacagaattgagtgttaattggttttgggtgcaggttgtgacaggaaaaatgctccgtgtttttctgtttcccagctggattactcagaaaatcccacaatgcacatgtaaaaactttaccagcttgattatttcaggtttttttttttttttttttttttttttttttttgtgggttaacttgggctaaatagcattctgttttggattctacccttcccctttccttggattctagggccaaatgtaaaaagagagctaaattcggaattaggatgtaaaagggaaaaaatgcagatcgctttctggcgccaactgcctcagaaagcaggccagggagtgctttgcattttgttcgcaagatttggaattggacctaaatttcagagatgccggcctctgggaaccaaagcaccagggttagcaatctgccatgatgaaggggagacaatttggagagccaaaaatgttttgcctgtggtatggtacaggactcagttctttctgcccacccacactgccatcgccacacacaatactgccagagtccgtgggacccaaacagaatcaaaactgggcagagcggcattggcaaagtctaaagcacatgattaggtaggtgctccctggcttttggaagcgagtaggcttggcgatttctgcctgagctcaaattgggaaaactgagcacccaccctgcaggtgactagccaggctgggaggaagggctgaggacaggggccagagcactgcctttgggaggcgtggctttgagtcagattaataagggcatgttgtggacaatcatgccatggtgcttgcttgttcaggtgtctgatgccactgacttctctgaaagaagcctgggaatccaagcctggcttagatgtcgcctctgttttttcttgcttattttctcttcctcttcgccttgcatctccacctggctttacagagctggcctcagagggagaccagcaacaacattaaacaaaaggatgagggaaggtgagttgccaagcttagaacactcttggccttgcgtgtttggagatttcaagaacttcttgcctcctctgcctcctgtttgtttattcttggcacaaggaagtttcctgtttttaaggaaaacagcttacaaaatacttgcaaagtctttttgggtatcaaagctcctttccaaaacaatattttgccgatttaacatgtaaattaatcaaaacaacatgagcaacatttcctataaatcacatgtgggtttaaaaaattagcaggatagcgcttaactgaacatactttggttgtagaagatgagagacatttgaaacccacctcaagatgtttgctaagtctacaatgaagccaaatccaagggctccgaataaaaaaacaaggaaataatttattactgaaatagctcaggagcgtgattaggccctgactcttagaaccaaaacaatctccgcaaagtgatgggagccctgctcctgagccatcaagggactacggctgctatgacttgggtaagaagtgtcactgtaaaggctgttgtgttgagtgtttggtccccagagctggtggtgctattgaaaggtgatgggattgcagctggggctaattgcatcagtggatcaaccactaaggggtggatggctcagtgagctactagaagtgggtgtcttgtcaacagcacctcgctctgtctctctctgcttcctttccaccaccaagggacccgctttgctctatcacaagcttactgtatgatatttcacttgaccacactcaggtctagaaacaactgagtcaagtaactatggactaaaacccctgaaacaacagagcaaaatgaacttttcttgaccttaaggattttttccccctcgtgtactttcttacagctcccagaacatccatgaaagcagaagaaccatttgaaggccagtctctgagactctggctcattttctttctttctttttttatgttgccattgtaccttttaaaaactttaattagaaagaaaattattttacatgtcaatcccaggcctctttccctcccctcctcctctgcccccccccaactaacaccctacctatcccataccctttctgctcccaaaggagggtgaggccttccatagggggtctcaaaagtctgtcttattctttgggatagggcctaggccaacccccttgtgtctaggctcagggagtatccctccatgtgggatgggctcccaaagtccattcctatgctaaggataagtactgatccactacaagaggtcccacagatttccaaggtctcctcattgacacccacattcagggggtttggatcagtcccatgctggtttcacagctatcagtctggggaccaagagctctcccttgttcaggtcagctgtttctgtgggtttcaccagcctggtatggacccctttgctcatcagtcctccttctctgcaactggatttcagtccagttcaaggcttagctgtgggtgtctgcttctacttacaacagctgttggatgaaggctgcacgatggcatatgaattagtcatcaatctcattatcaggggagggcatttaaggtagcctctcctctgttgcttagattgttagttggtgtcatctttgtagctctccagacatttccctagtgcctgatttctctttgaatctataatgtctccctctattatagtgtctcttatcttgctctcttctgttctttccccaactcaacctccctgccccatcatgtcctcctcacccctcctcttctccccttctcattctcctagttccttcctccccacccgtgctcccaatttgctcaggagatcctgtccctttccccttctccaggggaccatgtatgtctctcttagggtcctctttgtttcctagcttctctggcagtatggattgtaggctggtaatcctttactctatgtctaaaatccacatatgagtgagtacataccatgtttgtctttttgtgtttgggttaccttgctcagaatggtttcttctagttctatccttttgcctgcaaatttcaatattccttgttttttttttccccgctgagtagtactccattgtgtaaatgtaccacattttctctatccattcttcaactgagggacatctaggctgcttccaggttctggctattacaaataatgctgctatgaacatggttgaacagatgtccttgttgtatgaatgtgcttcttttgggtatatgcctaagagtggaattgctggaacttgtagtagactgattcccattttcctgagaaatcgccatactaatttccaaagtggctgtactagttggcactcccaccagcagtggaagagtgttcccctttctccacatcctctccagcataaactgtcattggtgcttttgattttagccattctgacaggtgtgaggtggtatctcagagttgttttgatttgcatttccctgatggctaaggatgttgaacactttcttatgtgtctttcagccattttagattcctctattgagaattgtctatttagttctgtactcactttttaattggattatttggtgttttggagactagcttcttgagtgctttgtaaattttggagatcagccctctgtcagatgtggggttggtgaatatcttttcccaatccatgggctgtcattttgtcttgttgactgtgtccaaaacccatctcatgagaagtgatttccctatccctgatcacccaacacaaccatcaactctcaaatctccagtgttcaaatctccaaaattcacgagactcagaagctaaaaaggctgacactcttcccagcttatcactgttccatacagagtttctcccactcaggactagaactaggtatgccacagatgtttgtggaagagcataagttcccaatcatctccaacacaaccttctatggggaaaccacagagatagtgctgctggtcagtgagtttacggtcttgaccaagtcatagatttctatgaaacatctactatgaaaaaaatgttacaataggtaagaattcaaaataaatgtatgcacaagaaatcagccatttgattttaaagaacttgaactccaggtgagggaattccatgaccaaaacaatgcatgaggctatgaaactggagtttcatgttcaatggatagttatatgttccctttcagatggcagttcctctcctgtagagcatctcagtgtttcagaatatgtgacacttaaatgagaagactttatagttcgtagagttgtgaatgtgagagaatcttgtgtgaccatgcaaaagaggacaattgcatttaaaaccccggggaaaggaagtccttaagttagtgaaaagacggagaaagacccagaagccctatcaggactttttttccaaatacgtttcttccaataatgtgcttgtcttgataactggaattgcagaaattgatttgggaacttctgggtcaaaacctacaaatataatttcttaatttgtcatctaaaaaaaatccttatcctacttctaagagaaggcataaagactatgatatttaccctaccccttaataaatataggtggaacaaagaaagactagtttgatgcactgaagaaacccagcagctgcaagagttgtaaagacttaatgggctttagcacacacactgacatcatctacacaggaactgcgtgctttgctgtcattgatatagcttgtaaaaggcgtttgacaaagcttccttttgcagacaaaatgaatacataccatctgaacagtatcacaaattaaaggacttagtaattggctcaaagcccaaacttggagtatattccctaatagattgtgaactcaggttgtgccaaggccatccatttcaatcttcaactaatggttttgattaatttataaaagtgtgcaaataaaaaacttcaaatcaatggaaattgcaaaagaggattataccctaacttatgggattttaatatgatggtctcaatgaactgtaatgaggatataaagatcaacacaaaggaaatgcatataatctcatgtttgaaccttaaaattaattgtaagcatagaaaatgtcgaagaggaagttttcaggaatagattagaaaggatttaaacaacactgttggccaactatgtgatttccaaagggagaagcagttcgtagagaacctaacgagatcacagcatttcaatgcgcacctggaatctagattgaaggatgcaggtttccctttggtctgcaaaggtcatcacaaagttataactttttaatccagtatttgtgaaggatgaagactcatcagaggtacggacaagacagtgaggtagtctttaaaaatattccaccaatagcagacgcatctggcaatttctgcccactgtagaaaatatccaagagaaaaatatgtcaatgcatccaaacagctggcattttctatttgtacaaggagtcacactttatttatgtgatgttatatgacataacatcgtaacatacgtgcagtagttgcataacaatttttttcataaggatttaccggatgttatctctctgtcaggcattacattgagcaacaaagcaatgagacaggtacctgccctaaagcagctcacttcctgtcaggagatcaagacagacagctggagctctgtgggatctgggacaccccactgaacaacacactgtggtcaaagggagggaacaaagcatttttgcccagatgtttttgctgttgttgcttggtttgtacaccaatatggtatttcatgtaagtcacactttcacacaattctgctgtattggtttgtaaaaaaattaaagacagccttcagcagctcctgcctcatactttctctacttacagaggcactgttgtcgttctatacaatttatctctccatggcatggttacagtactgtattcttttcagcttcaggttttaactagggatttcttcttgtaacagaggagtccctgtctccatgtccaacacgtgcatctgctcaccctcttccagtctctgaatataattactgtgtggttttaattaaagctgttactctgcctactgtttggagctgggtcatgtcagacattgctcgtttttgtctttgatacatttccccactgtttttccatatgatatcattatacttatcactttaaaattcccttactccacttcagatgtatttgccattcatccaattccaaacacatcattatttgtctcaacgttgactaattttagcatagaaaataatgtgtcctcttgtggtgttttcatacaccaattctttcttaaaccatcatgtctattcaggctcatcttccaggacagatcatgaaagccttctgagctgcttaaaccagactcttgactactacccatgtggcagaaagatgtccatcttcagatcttgtgcaaacatccatatggtccccttttttcactcctcttctggggtgtcctctcacaaagaccctattatatcttttcctagacaatacctttttccttccttccttccttccttccttccttccttccttccatccttccttccttccttctcctccctcttttcttgacaagcacacatttcagaagtttccttcaggaaggaaacaaaaagataattttgaggtattaatatatattgggtttgttgttgttgttttgagacagggtttctctgaacagctctggctgtcctgaaactcatgctgtagatcaggctggcctcaaactcagagatctgtctgcctctgactcctgagttctgggattaaaggaatgtgacactatttctggcaaggtattactagatattttacttccatactttgataacagtttgtcattttctttcatagtttcaagggcatctcagtcttggtttccaccttcagtttggtcagcagtcactctgattcctgattttatatgcagccattcatccttttagaatgctctggataaaatctcccaattattttccttaatattgctccattgttggttaattttttcaggcactcaagattgttttaattttgtgcctctaggaacttttattattattattgttattttttgccttcttctctttttttattctggaaccctgtggatacttagattaaggcaatctgtacagacaccattgtgttccctctctattccatttgtaattttttccttctttttctctttttaaagaatattctctgattcttttttcataatttatttattttttcaaatttcattttatattccaaccacagttcccccttctacccctcctcccatttcctccccaatattctctggttcttattacaatatttcactaatccttttgttccctaatggcataaattagaaactctggagttacatgatttctttttcctttctctgcaaaagtcaattcaccttttctgttgtgtgtaaccattgctttctgtcccacatatcctacattagaggctttattcaaaaacccagttgttaaagctttgatgcggcctgctgctgctttcagcacaggacctgggtcttcttagcagaagatccccattctccagacttttatggctttcctttcaggaagtacacatttcccatgggagaaatttcaggtaccctgtttggcagctgttattctgggagcaaagcagacagaaaaagctgagtttttttaaacaagacatctacaccttgcaatatgcctgctgccacctaagactctgtgttttgtgctttctaggcagcaaaccagggaggaactgcctggcgcagagaacatgggaactggctatctgcctagtcctcaagagagcctccaagtcttacttattctatcttctctcttgtaactcatcattctagatacacaaggttgacaaattttgagcctttgggcatcaactgtttaactgtgtcgggttttggtttttcttactgctgacttagttcctctgctccttggggccatttattttctacctatctgcttcctaggatccaagtttgtttcttatccactggttttctcatctttgaagtgatatacatgtattaaatacaatacacatattctatttattgtgggtctaatttctacatgtattgaatctacttctttttcatggtgagtctggatgctttcagaaaggatgacacttgtgactttgtagagtgagtcatacctttcattgaaagtaggagtgatgaccgcacaaggtgacatgaggaaactttgtggtatattcaggaattcctgagtacgcctgacactgactgtttgaagatagcctgatgtaaagtgctcagcaagactggaagcagagacaagtgtactctgtgattgggtgagagtgaggaagggaagcaaagagacagagatggaccaggattggaaaagcaggtgtggagagatcagtgaagccaatggaggaagtagtgacaacacattaaaagttatagttaagaagtcttggggacaatgtctgtcatcccagaactttggaaagctaaggcagtgaaacaggagggtgctgaatttgagctggtcctgggcaacatgatagcctatgctacattgtgaaacccaatctcaaaaaaagaaaagaaaaagaaaatcatgtgtatcccaggatggtttctgtggcttcaaggaatataaaattctttgtaactctttatcttcagaatgatagtggtaggtaaaaattctgattaattcatctatgacaaatgccaactagtcgctggctgcatttaagctatttggtctctaggaaggcatgagaactgaggaatgaggaagaaaacaaaggcacgaagagtgaggagtacagaaaaagaggcacaaagggaaagggggaaaaaaacagccacagtgatgacatcacctctgttttaaagctgagtcctgcatctgtaggagtcatttctactctgtctcaatagagggaaacgtgctgagctcctggggttgctggctaacaggtctaccagatggactatgggtcttgcagctggagtacagcactccactcaggctttaagattcagcaatgtattattaaacctgtttgtaacacaatgtgcaagatgacatcatgtccctgagtgtgtgtgacctcaacaaaaatatgtgccctgctgtgtaagaagagtcgaattccaagacatagaaaaccaggcagaaatttgagtaacttatatactttcttgtctccaggctctcaaaccttcagtgttttccaaacaaacaaacaagtaaaaaacagttattttgtatgacactacagcaataaaatgtaattttaaaagttcagagttaagcacctatcatgaacataaaatggagatagccccaggagtgtagcacctcagctataatatgccaaggagtaaaataattggagaagtaagacatttttttactcattatttagcagagagtgacttaactcttgatcctcttgcatctacctcctgagtgctagaagtaaaaacatgtgccaccatagctggtgtctgcagccctggggatcaacccaaaggctttgtgtaggctaggcaagtacttgactgaatgtgctacattctcagtcagaatggccattgcatagggtgaaaagctaagaagtgtaattcaacagcaaagcaacctcgaaactggcagagtcctgaagaccctactacttatgagctggccacagaaagcttggggagctaatgaggcagttggaagagatgtagctgtggcctgggacaccagtagagtcaaagagacagacatacttcacataccccctcctgcactgtattccaaagtccttaaaaggtttcctttcctatgcccatgtgtgtgccaactgatatgggagccaggaagatgaagacaagcaaagcaaacaaagctggaaaggttgaagaatggtctgaggataaataggtcccaacacatcctggaaagacataatgcttttttacaaggattgtctgcagagccatcactgatctgagcacacccaggtgacttctcttcagagctggagttagaatgaaatgtgaaagtattaggagcaacatttataggtaaacaaaaggcaattgcccgcactcccttcgtagccagaacctgcattaggagattagcaatgggcctacctaataagactcacctttctctgtttttatttttggttggttggtttgtttgtttgccattacacatggctaatattaagcttactccaaattaatagaaaatagtatttggacaggagaaaactaacatttgcatatcacaagtattgtcttcactgctgatgatattagcattcacaatactgacatctaacacccatctctcttctcagggctcaacagccccttgttctgtaatcccattgttttcatactgtcccattggcagacattctactatgagattgaagtaatttgcttaaagtgatacttgacagttggctgttgaagaaatgttctattattaactaacatgtaattagctcattcaataatagcacaactgaatagcatgtaacttaatactgtctaccaaggtggggaagtccacagtttctcaccaatgggagcagaattatagtgcaaggaaactggacatgaggagaagccagctggcaggacctggagtgtttcagattactgtgtgtttatgacctctgtgttccagaaaaaaatcaattagattatgctatttgagaatcttggaattcctatggctctgtgccagtcttatcagaagccctcatctagagtttaattaagctgttttaaatttcaccaacatttctgggtttcaggaagagaaaaaaaaacaataaatgcaggaactaataaacaacagtgggagaattctgaagttccctcaaatggcagcatttggtgtaatgtagttgattccaaagcccacctaatgctagctttattgaaagtgaacttgccacaatgctacactctttgtgtacaagaacatttcaaaaataagtggaagcactatgagaactgtgagcgtaaaaagttatcatatcggttcagaaattttaagttattcccccattagcttgtgtgtgtctcaggctggggtcctccagggaaagttacatgagctccaacacacagagaggacagtggctaccctgatggaagaatcttattgactgatgttctagctagttactttacataaaagacttttttttaggtgaacaatacagaatttcataagtcagaaagagtctctctgtaaagaagtcaaggtcaatgtgtttatctctgaagaaaggttaaggggaaaggaaaagtttcttcaaaaattagtagtctgtgagatggtatttgctcataggcaggtggggaggcatgccaactagaaaattaaaatttagtatgcagattattttatctaattattgcacgtcagttatcttccttaaataatattaactcaagttgggggtgtggctcaatggcacagtacttgcctactttgtaaaaggttctgggtttcatctccagcaccacccatgatgatgatgaagatggtgacacatgtatgtatttgaaagattttatcatcaaaggaagctgatttattccttattgttcaatagatagtaacaggttgcagaatttatatttgtactagatatgtagcaataaagaaatatgagttcttactctcatatagagttattctcaataagagacagatttagaacatgagaataaatagatgttatactcaaaaggtataggaactatgaagagagaaattaaaggactggtgtatataactttggctgtgcataaccatacctagcatccatgtaggaaaagttcagtgaaggtgaaccatcaaagccagtatactatatcatgatatgggccaaagaagtagtggttagatttgagggtccctctgggtctcaagaagaccttggcatttactgagagtgagagaggaaatcactatggtcttaaaaagtgaagtaacagggcttaatttatgttttaatatgaaccatggctattatggaagagatggaaggcttcatgtaattataatatagacataacttgaatgtcattgctaatcttgcacactgcttctatgcaatgatacctaattcaagggaaaaataatagagctagctgttgttatttctagtctgctgatgatatagttgcatcagtatttatcagggctatgtataaaaatagagtcaatacagacaataatatctgtctgtctgtctgtctgtctatctatctgtttattcatctacgcatcttccaactgtatatctatctatcatcccatcctaccaaaaggtccattttaagagagttttctctctgattgcatgtactgactatggcaaatccaaaatctataaggccagctggaaactcctacaatgatataccagcctatcagatagaaaatctaagtgtaaaactatctgcataactcaaaggagagccaggtacaatggatagtaaagagataaagcatagtcaagagagttgtcggtccaccaagagctgggctatttgttgttggataaaaattctcaaatgggtcagtctggttttccatctccttaacctgggaacctggcatctgacactattgccattctgatcttcaactccttaacagagggttgttatgtaataagagttctgtaatattagagttacataaagtcttccatctcttcatgacacaatttaatttgtttttacaaagaagaatacagtacgtgtgttattttgtgggtcatgagtaaagtctatgtatgtataaggaggaactactttacagtgcaccccagtgcttagtaagtattggcaatatggacatcactgaggagcttcccactacagtggtgctattaaagaccttatcatagtgaatttggagagatggtgaagctgttctgaactggccgaatcatttgcctctggagaagaacagttccctggggagcagggaagaaggaaggaaggagaaacgaaagaaggaatcttcatgactaatatactaagaatattctcatcttctccacagaatggcatcaggcagaactctgcaacaactccttgtcagaaacctcagtagacgcgcacatcactgactaaccgcacgtatgtgttactcagaatggaagatcctaaggttctttaaccacaggcatctcccggttgggtgaaagaaggcagcttcataggcccagacagaaaagggaggtggttatttttttttttttacaagactctgatttatagtcaataaggtgaaaagttaaggtatgcagagtccccggaccatttatatttctcatcagcaccccctttaagctagtgtctgcttgtggtttctaccaagataccaagagtattgtcattgccataagcattgcttgttctcgtttctgacttctgggcacaatctgtgaagccaccctttcagatgaaacccctgcctttggttactggccaagccagggtgtgatattttcctctttaattaaaacaaaataaaacaaacaaacaaaaaaacttgtccatttgtttttgccagctatctgaaagttcaagaactaaagaacatttccctccacaaacaagccgtgggatgtgtttgaagctggttttacatcagcagttgctgtttgacacattgattccactgtggaggaaggtggtgtaagagtccttcctaaaaggaaaaggaaaaaaaaaaaaaacaacttcatatttatcgtttgctgtctaggcgggggggggggagttaaatgatttgggggtcctctttcagacattgatataagcaaagccccctcagaagggaggtgcctgctgtcttgcttgacatttggagctagaaaataaagatatgaaagtgaccctgttctcactttggggctttctgtcttaggtcacaatgcaactaggtagttttctagcaaaatagttcataaactatatttttagattataatgatgcagagctgaatagctcttcaatatccaccgcattctaagcacaacacaaagacattctttgaattttaatgcttttctccaagactagacttagggttctcaatgttgaacacataaatagcccattagccttcatattttgactatactagctatgatacatacacacatacatattctccagtgaggaagcttctaggtgattttactctctctctctctctctctctctctctctctctcttcttcttcttcttcttcttcttcttcttcttcttcttcttcttctccttcttcttctctctctctctcttcttctctctctctttctctctctctctctctctctctgtgtggtgtatatgtgtggtgtgtatttggtgtgtgtgttgcggtgtggtgtatggtatatatttgctgtgtgtgtgtgtgtgtgtgtgtgtgtgtgtgtgtgtgtgtggttgtgtgtgtgtggtgtgtatttggtgtaagtgcatgtgtatgtggtgtggtgaatatatgtgtggtgtgtacttggtatgtgtgtgtatttggtataagcgtgtgtgtaagtggtatgtgtgtgtggtgtatggtatctgcgtgtatgtggtgtatggattgtgtgtgtgtgtggtgtagtgtgtgtgtgtgtggtgtagtgtgtgtgtgtgtgtgtgtgtttgtgtgtggtgcatagagtatatgtatgtggggtgtgctgtggtgtgtgtgtgtgtggaggaggaggatgattcactcatacacacacacacacacacacacacacacacacacacacacacacacacagacacaccagttaggtttttctcttctacttgaggcctcagtgcagatctggtaggtgaaggtgcagaatattcccagaaacagggaatacagaatcagggaagtcagacagcaaagcatgagacaacttcagcattaagatggcagctctgtagaccgaatgagaaaaaggccacactgaagacctctccaactcctcatattagacactaaagagagctagcagagactaaacaggtcattccatgagagatcacacctgaacagagagtcctatgtttggcttggctccaaggctgcagagaatgtggctgagcttttcccctatctgagcctaaacaacgctctctaggggaaccttggcatctcttggccttgtattggcttttaagctgatgctgccagcaagttgccagagtaaactaaagttctagagctgactgtcccatatccatcctgccaagtaaaggacagtgagcagatattagctactctcaggtcctggggatggaatgaaggttttaaaatgatggctggcagggacaaggttctgacagtggagggcaaggaatctccagtgtgacttcattggctgtcgataggctctcttcaaagtcctttctgtattacgagcaaatctggagagttgcctctcttacttcaagcctgtgaaaactcatctctgggagctccctaactttgaagacatcgacaatggatgttggaatcacagctgagcaagccagatggaagagctgtgcggggatcagctattctcctggggttgctgggctaagagctgtgctagtgtttctgtgctagagggaggtgaaataggacaagagccagtgtggggtgagtgtaggtcttttctggtgaccaccaccaggaggagtggcagaaatagaggcagtaaaaaaccagaagagaatggggtattcttggagcacgctggaggactcacaagatctccaccaaaatgactcatgggaactgagagaatagctttgcaataatgagtctaccgaaacaggccagaaagtagcagtacagatgtttaaatagtccccaagcagaaggcatacatagtggaagagtatgtcgggtatggatttgtatttatttatttatttatttatttatttatttatttattttattttgtttgcttgttttttcaagacagggtttctctgtagctttggaggctgtcctggcactcactctgtagaccgggctggcctcgaatttacatagatctgcctatctctgcctccccgagtgctgggataaaaggcgtgcaccgcaaccacccagctcaggtacggatttttctcactcctcaacatgcattacctcttcccataaccccacccccaaaggaccagaagggagtgagcatattttcaggtgggcaggtaggataactgtgaggtagagcatgcatcacacctatatactcccactctgccacttaccttgaagtcaacctggaagctgcacaatggggagatgttgtatttttcagtcaaatgaaagatttcctaaatgtttggatgcagcattgtgtaatttctaacttgagacttcctggcttaaagtgaccctaagacttaagcaggatctaaaaatggcccaagggaaattttatctaggttaggtaacagtttaaaagaataagtagagaagaattcttaaaattcatttgattatatcatgaattctgcttgcctggggaactacttgccttcccgtagatgtgatgagcccaggacaacattccaaccattcttccagatccatcccctcacctaaacatcctctgaccagcccttctcaaatcagtgctacttcccaccatatctgtgacaagaaagccacatggttctaacagccacttggagaaaacaaggggcccatttcatataaaagattctggaaccacatggatatcccctattccactatgccaggaagtagggacaggtgacatctgaagtactgtaagtagagtccctcatctgaggaggaatgactagcactgaagcagagttccctttgctggggtgagttggtttccagcctctgcgaactgtctcttcaacatttctggcctcaggtgacagaatgacaagggctggagctttatttgtcatttccaagctacccagggcatcgtcacctgggtatacacctgctggagagaatggtgaggaagaaggcagcactctttagactggcttagtgggccactcagtcgttagcgcttaagtatgaatatgacaataactgtttgtctagtatttacgaaacaaatgcttaagctacactttgaaggcacctcatcttctgcattgctcaattctgtgtgatgggcaccatgctagaacataagcagtaagaaaagcatgcccatgctgttccccttagagaagagctccagcacgtgctgctgcgtctgctttactacaacaaactcaatgcagacccaggtgtctaacacaaaggacagaggacatggtgcttacacacgatggcatttttttttccttcgtaaggataaaggcagttgtgtcatttgtaggaaagtgaatgcaactggagatatcagtactgagtgaaatgaatgaatctgagaaagttgtcacacatgtgtcatttggggcccctagatgtcacaggtgccgaataccatatgcatactccatggcatagaagtaaaagaatctatggggggggcaaggaggatgagtgagaagcaggagagggaaatggggtacagggaaaatacgctcaaagtacgttgtatacttgtacaaaaccgttcttttgtaaccgtgtaaactaaaagtaaagaagaaagcctaggatgtagaccgcaagctcacgaatgtcacttccttgggggtgaatcactgtgactgctgtcgttaaggctctgaaaattaaatggaagaaaaagttgtgaatacagtgcagatgggtgactcaagagaaccctgaactatatagcaacagagcaggacttagggaggagtaagaactgagaatgacagggtgctctgagtgcctcccagcccgagcttggccgtgttcactgctggttcttgctttcatgtctcttctttcagtacactgggacaaaggttcaagggcaagcccatggagcagggtcttttgtagctctgtaatggtgaattctttggccagggtcgggcttatataagtcctacgctacagaggccaactattcctgactgatgtcttggggctgcgattggatgtagctggacaggcccctggtctgaccctgagtgggggagtgtggatgaggaagtcctagctacccaggggttaaggaggagacagagacatcttgtcatctcaggagggctctcggtccatactggagactacggtttagttcagcattgtcttaaataactttccaaaagtggggatactggcagaagacatctcttatcatgtatatagggctgactaggaaacacttcctttaatcctagagctagtcctagaatgcatgtactcaagccctcagacattctacaaggccatgtcccactagtccccaggcacatttcactagctctcaggatgggtgtgggtccacccagggcctaggtctattgttacacaaactaggagccctattccactgtggccaggccatccagaggtaaccagatgacatctaaaaggcaatagatttgagctcctggaattgagctgaggcctattccgaaacattgcattaggccccgacagtgctgacctgcataagacctatgcgagatcaagcccatcaacatcctgtcacggaatgtcactgagctgctcctggctgaagatggctactggagaaggaagggttaaatgtgccaatgatgtgaccctgtaggatgtgagcaccagccctgtgggacagtggcctgtaatttcttggcagaagccaccctctgggcgctaaggtcagagctggggaaagatgccataaccaccatgaaggcacttgggcccaaaggccacaccggccttgcaatctgcacttgcagtgaagtaagcacacagcagctaactattcctgcgtgtggccaatttgatggggttaaaatattattaagcctaaacatgtaaacactaaattcccaagttgatcatgctgtaatactctattagggttaggccagattacagccggttgtgttgcctcatactggagcctggtccaagacaaccaatcctcttctaaaccgcgtagccattctcagtaagaacaccattcgctaggagccttcctgaagttccaacttcagcaaggcatattttaagcaccacctgggaaaaccacaggcagtgctggctggctcttggggagcatcagggaaatgccacacatctagagccccaggcccgcagtgccattcctggggggcggggtgggggagctccatgtggagcctgggtcacgcgtgctctacctcacattctaacagggaagaaaagcaccaggccgttaaccataaaggaaaaataataccacacgccgatgaaatcacatccaactggagcccagtttgtaatccttcatcctttctgggagtcagtcagctgccatggacaccccacaggatagatctttttccaaggcaacaaacgctcaattcattggggaactggagcccggctcctgtgctgtttcttcgagatccttaaaagggttgaatatgaattgaaaccaaagacatattattttcagaagtgagcacattttcaccctggtttaaggatgtcggcccttatccctcccttgcacagggagtgtgtcccagccctgtaagccattccccgtgacttcccagggcctggaagacaggcgagtctcttctgttccagccacagtgtttctgacagccttaagtgcaaaagcaaatgtttcgtttaggtagggaccttaaaataatgaggcttggcttttgaaaagattagctacaagaaagaaaaatgccggaggaagtcccaacagcaatggttatcgggacattaatatgcaacatctgggcttccagggattatgccagggagctgtagagggcagctgagtgcacacaatttgggtgagagagagagaaagagaaatacacacacacacacacacacacacacacacacagagagagagagagagagagagagagagagagagagagagagagagagagagagaatgagagagagaatataattctttaactttgaatgtgagtctgtttcgcagaactattggaattgtactatagctgcctaaagactacatgccaaaagatgagaagccttcctattggatacacctctgcagctgactctactcatttctgtacaacagagaaaaactgttggggctgggaaaataatgtctcagtgggcaacgtgagtctgggaccccaactcccgaataaagagctgaagtagctttgtgcatccattaccccagaactggggattgaagagagagagaggcattggggggtgggggggttgctggacagccagcctagttgaaacagcaagcagaaagtgccaggttcggagagagcccctgcttccaatggcaagctgaaggagcaaccaaggaaggcattcagatatcagcctctggtcccccacccccaccctcagggtcttgttgactgtcccggggttgtgcttttctctttgaggttctgcttggatccctatcccatggttccttcagaagttcattcacacttccattctcccttgacttgcaagcctagttagcacctttagagatttgactatttagatatggctgaacaagacaactcttttgatatatatatatatatatatatatatatatatatatatatgatcatgggagtgagatcccactagatccttggataccacctacgctgggtggagggagttaactataaaagtaaaaggtctcaggagtcatgttcaatccctgttgactgtatcttccctttgttctctgcaaagtaccatcatgatccaggaattagaatatacgtgctgctttcgctgtcctgataaacccggactgagttttttttgccatggatccatgttcatcacaatactgttctatttatcacctcctgtttcatctatcagtgtacacagttggctaccttaagatgtggggaattgaaatactgtgagattctcaatcgccctctgcatactcagatcccatgtatgctgattctatttgggtgtcaaaacttcaaactcttttcttttgtccacagaatctggaggggatgtgaggggttttttttttgtttgttggtttttttgttttttttgttgttttgcaggagggttttctcgggtagagttggggacttactcccaaaggaagcttaaattctcttcactgggtatgctgtgcttacatgcagggacactcgctttcatgctagagccactgaaacaggcgactccaaatgtaaaataagagaactgctcacatctgccatgcatcctgggtccctcataaaggttggtaccatgtgagaaaatgtcctcaggaacaggccagaggcacattgctgaaaaggttaccaatacttgtgtgttttgtttttttaagattcaaactgaacagttattttgcatctgtcctccaaatggataaagctgatggtgtgtagaaatggagtaaacagcaaagcaagaatggtcctggtataaaataaatttctaagttattttttcccttctgaaccttattttcataaaggaaatggaatgtcactgaatgtgcttggttcttcttcccaagagccggtttattagttatgggactaatgaagccaggtttttgtttgcttgcttttctttctttttctttttttttaacaatttctctcagtaaaatggaagccacacaagagtgctgggtggcatacccacacacgtatgcacccaaaacctgcaagaagcagcagccttttgtctattgagcaatgtaaaatatatcccgctctgttgcttttctgttaagatagctggaattctagttgttgcacaccataggctggattcaggactcctcagtttgaaaagaatgagcataggaaatgttccagaaccacagctctttactgcaaacaggaaaaagaaagctgggaatattctctgtaagacaacaccagtctgcaggcattcgaaattcagaatatcccagataagacccagataaaggagaagttcatgcctgatgcctttttacatgtttgcagggaacaaggattgtgcgctctttgccaaggaatgctgagaatagaggcagcagcgaagttaggacaatatttaacaaagcgcattgaacgggcaccaagcttccattaatggaattaagaaatatctgccagtgttccagggaagacgattcccacagttccccctccaaaatgttttcaactctgtggggtgagacaaaggggtggaagagatgaacaagcaggctgcttcatgggtagttagactaagctgggataaattatcttagcctcttttctgatcaataccttccctgagacattatggagagtgccaatgccccagttggcagagacagttcaaaaattgatctgaaaaactcagcagttgacccagaactccactctttgtcagcaccttcaatcacatctgctcttgagctgtgaaattgttggcgggatgcagagctggttgctgcaggcattcccccccacccccaaagcaggtcctctcagacgctaagggaatcagcacagcatagccttccttgctgggtcactatgcatatattgtgtatgtgtgtgtatcctttattcattcagtgagaattaactgaccatctacagtgtgtcaaactcatttctcaaaacatacgagacatagagcacccaaagagagaatgaagaaacaatggtcctgtagggatgaggaggtgaaggcattagtaaaacgtttgtcactcaagcaggagaaattaagccccagcatctacatcaaaagctgtttccatggtctagtcatggatgcagcgccattgctccagcaaacaacctctttcccacgcccacacaggcctagacatagtgtgtaactgcacacatggtgtgataacaagaaggggaagcaccctgggactacttgcttcaggcagagaaaggggtggagggtgagatggggtaatagaaactgaaagaatggagactcatttttatttttacaagtatgaaactctcaaataacaaaatttttaaaaattaaataaagcgaggcatggtggtctatacttaaaatctcaggattggggagactttaagatggcaagctccctggagcttgctgcccagccaattagtgagttttcatgttcagggagagaccctggctcaaaaagaaggcggagagcaactgaggaagatacttgctatagacctctgaccaccacaaacatgtgatccatggtatctgatgccctcttctggtctccacaggcaccaggtacacatggttcacagatatacacaaaggcaaaatattcatacacataaaataacaaaagccaaaagcacaccgctgaagaagcctcaaactcaggatttaagacacaggcccacagccacaaggaattgctgtgcagagggatcagctgggattcacaactcaggtctctttgactataccatctccgtttctaacatggctcctgctagccaccttaggacactgcttgcttgaaagagtccacagcctctaagttgttcacctttcatagagattgagtagaacaacctgcttaggtcatcacaagaggttatcagcaaactgttcaaagcttcctgtaacttaggtgagagcttccacatcatttccttgtaataacagtcaattttctttgtcctctgatctcagtgtaagtctgcggcagaaactgctgtccccactcacccacagcctgtcccaaatggggtgtaagtttccaatatcccgcttctgacaaccagatatagtgggaaattaccaatacggagtcaggtagaaatataagggtatttaataggggaaagttccctttccccattgttgtcacttaggatagtgtatatacctagttagagatagcttcctaatgtttatggttgggattggaaggaggtgttcaggcttagacacctctttcagatgtctttagggtttagttaaaatagatagttaggatgtgacataaacagattgttgtatcttcttatattttacctttatgattgttaattttggaaactttaaactgttaagatttaatccttttttagactaaaaggggaattgtaggggaagctgtagccatgcctacttaggggctggctacaggtgtgcctgatcacgccctggcaagctttcgagggcgtggtcaggggatgtagggtgacttcgttttcgttttcgatttctcttttggggttgcgtacagactgctgccacgccgactggctaggtcactctgtaagtaaggcttttccctattaaatacccttatatttctacctgactctgtattggtaatttcccactataatctgatggtgtccctgggacccctgcatggaaaccactggctgattttgatcatgcattacccatgggatgagaagccactatgtgttttctcattgactttgtattttagcctccatttcaacagatgaaagacaacatacagttgcgtaaaaccaaaggctgcatttccttaggctcagttcaaagcatcttcaggttctgagcttgtccaccatctagggtttgctccctttcctagttcatgtgcagcttgtcattaccccttctcaggcagattcccttttccaagaccagaaggcagcttcctaggcgtggacatctgagacagggaagcactgagaacagaggggaagccacttaatcatcccctgtgggagctgagcaaccccctaaccctcaagctgaacccacacagcctgatgtgaatcagctctccaatcacattcatctttgaaaacagctttgggctccctggtttgagctgatccttgagccaaagattcaggccatttgcagagatcctggcaacaggagccccagctgtcagcaagcagaagcagtgagtgcacacatgcgcacccagggaggtgaagttagggggaacccatcttcccaaacctgtgtcaatctttgagatgctttggatggaatctgtctctttccggggataatttctcccaaagtataaaccatctctatcttggatatcactggtcaggaaaaaatgacacagctttgctttttatcatgagtggggggtgctttgcttctcaatcagaggatgggtggtgataatgctctgtcacctgctactatgataggacatttttattgagctcattttattgcttagtgaatttccaagctgctatgtaggctcttcttatgtccttgctgttagaacttccacaaggcaggaagcaaaagctcatggaactaacaactcacctcatcttctgtaaagtcccaaactatgactcggtaggtcacagttccagaatgctgatgttttctctcaattatctgtctgctttgttcctaaatattcccaccaccacacgaaggctaagttccagaaaccattgcatagactgatggatttctctgtgaatgtaaaaaaaacaaagaaacaaaacccccacaaaaccctgtgaacatggtgacaaaccaactcacagaaatattatgtctaaaaaactaaacgtcatcacagtacattcaaactgaaattttgaattcactaccaaggcaaagaatccaatatcaaaaggttgtcagatccagtagtcttcgaatattgtctgtcacctcttggttcagagatagagaaactgagacatttcatatttgtgtgtgatgggtgctaacgcgcatacagacaaacgtgtatggaggtcagaggacaacactggctatcatttctcagatgttgtctacctttatttgttttttttgagccaggatctctaactggtctggaaccatgttaggctgagctccaggaatccacccatctctgcctcctcatgtcaggacacctgactctttttagttagattctggggactgaactctggttctcatgctttcaaagtaagaatcttactaactgggccatttctccagttcctgaatctgagccttcctgattgcaagaccagcagtgacaaatgtctgagaagctgaattacagcttgtgaactgatgcaactgtatatttaaaattgaactatagctgtcagtcacatggagagagatgtacagtctccagttctcaatagtcaggcttggctctgcttgtggctaagttttgggtatgttattaaaacaatgttactatttgtagcctacctaaatattctccctctccacagcagaaaaatttgaaattcaagaagccaacatgacaccagagtgcccttggctgattttcctccatataaatcagctacctataaatggataattgaattgaaaactctagagttcaagtgcctttggagtattcatccaagtaagccagatttttttttactctgattaacctctaaaaagatataattgtctcaatctgggcacaagagagaaaatataaacaaaacctcaagtatattcagtgggaacacttgatacaggggtttggacttttgagtcttcagaaaggccaaagaacaggctccagtgtgagcctcctgggatgctccctcagcaccagagcttcagaaagtcttcagcagtgtgacaattgctaaggtcagagagtcattgcaaagatggcttttgtgtatttaactctgcctaggatgtggcagtcggagttactaggctcaagcctgtgttagaggaatcaaaaaacaaacggtggctgtactctggagtgctgctcactgactgccatacccacaggatcttaaaggacttgaaactagggctggacactgcaaccctgctgcagaacccccaggacaccctgatcttgcttgctagtggaagtcaaccaaggcagccgttgtgtggaactggcttctttgctggctacctgtgtctcctcaacacattggtaaaacctactgcacatgggtatgaacaatgttactactaatttctctaaaaaagttcatatgaacttcatatatatatatatatatatatatatatatatatatatatatatattcatcctatttatctcctactattttccttaatgccccacctccaggatttaccaatccatctctcccccaacaccatgttctctcaaaatactattataatacttcacttattcagttagtgctgaccatgtgcaaaccagtggggtcatcgattgggacgtagggcaacctgtcagtgtccatgtccccaaaggaaagtgactccccctccctcagcagccaccaactgccaacagctcttcagcttggtataacactggaattttgactggcttgatgctgtacaggtatcatgtaggctgtgaattcataagcatttaccatgttgggtccagaagatggcatttcatagccaaggatcattggacagccagcctagctgggtctgtgatctgattctgtgatctctagccttaatgagagactctaacttaaaataagatggagaaaaatagataaagacactcaacacctgatatcaacttctggctcttccctggccatgtatgagcaagcacacctgcatgttcacactcttatagcacacacacacacacacacacacacacacacacacacacacacacacacacgtatacaatttccttaacaagaaaaaccataaccaatgtttgttaaacctacaggctatcgttcatagagtcaaagatcaattccattatcactaaaatccctctattatcaaaaagagtctccagaacacaaggaagatggactgtcaggttaggggtcccagctgcctcataggcagtagtcactcatggcagtgcccccggtttaactgatatgagatgggtctggagaagaacagggtgagaggagagtctgcaaggttgagaggccctgcgttggatctggacaacagagagagtttgcatccaacatttggatagacaatgagaggcagaagctccagcagccaagagctgtcatctgggtggaactcttccaaacgccttccgctatcattccaaaccaagtcagctccgtgaaggagggtcaggatggacacacacacacacaggcacgcactgctttgagtctacagacaaaggacagagaacacttggaagtcattccattaatgcataccacttctaatgatggaattcacaatggaagaatgctttttagaggacaaaggagaactgggccataaacaagcaaaataattaatgagtcaaaaatcataacaacattatatggccctatttactgaagccgacatgaaaaacaacaaaaagaaaaatacccttgggcaggggctcaatacctataatcagcacttgggagactgaggcagcaggattgctgtgagttccaggctagtgagagctgcatagtaagatcccatttcaacacaacacaacacaacaaaacacaacaacagccaaatgtctgtattgtgggggctagagaagtagctcagctccctggagtactgccactcttgctgaggatctgagtttggttcccagcatgcaatgcctggcacctagcaatgacctgtctataactccagcttaggagacctccaacacctcaggcctctgtgtgaagcacacacatacactatacagataattaaaaatagaattaatcttttaaaacgtctgtgttgtaatttattggatgtttaagcaaatggatcaaggttagaacacacattaaattagcctatctttgatttccccctggggtgacagggaaacagaactctggtgtgtttgccttgctccgtaatttcagcaccaagcacactgacttttgcaaattgcaggcaatttttaaatacttgattgactgactgactttccaggaaaacacaccaaagcagaaaataatagcaaaatctttactaagcaaaatcactaaaaatctccagctggcaaacctctcctccctccccctttcaggagattaattgcagcacttaacatttgtaaagcatttctgacacatcaaaatggccagaggggaatatgtactgaaaatctaatccattattattaaaaaattgccttgtggtcccagcaactccccagggaagcagagatgggaaagaaagggaaactcacattcaatatttttctcaatgtcttaatttgggaaaacgcagagggtttgttggtggttcattcagaggtctgggcaaaggctcaagcccattcctgagttatctaaactgattcatccttcccctgtctaaagccaacaactgcagaggtttgcggcagccgctgccctggctgtgctctgcgccgagggctttagtaatgggtctccttatctcctggtgcttctctgtctcatctccttcccagagcttcccaacataatcagcatctccggcaaccgctgacagacacaatagatgataaagcaaaaggttagtggaaggggacccgtgaatccagtttgacctagagaaaggaaacagggccagaggtggagcaagagtgacatgcaagtggacagagtcagaaggactttagcgaggccggatacaaagtcaggaaaaaggaattcaagaggtgagctggtcacttgctgacaccttctcccccagcagaaaaaaaagtgacggccccaacaagttaaagtattttatgtgctatgtccataaaagctattgagtttttgttaatgtctgtgagtgacttaccatctctctctgttgggagactttttcaagctagggtgatcatttgccagagtgccctatccagcatcttctctccctctagcctgagtgcccaggcagcagtgttgagaatggcttctctctactactgggtgaagtcttagtgaaactcttcatctggattttcaggactgagcgtatgactcatggtgctcaaactggactcttagagagtccattcttcggtcttagagaatggagtcagacaagctaaaggactgggaagctgcctcactggtgcaggggcagtttgcaaacaatgagggtatgaatttggatacccaggagccacttacaaccctattactggggaagcagaaacaggtggaccccgggacttatgggcagctattctagctgaatatgagtgccaggttcattgagaaaccttgcctcaaaaactaaggtggagaaagatagaagaagatacccagtgcccacttctgttatccatacacaaatgcacactaacctgtacacacagctgcaacagatcacacacacacacacacacacacacacacacacacacacacacactggaaaaaataatggttggtattgtctcgacaactgtgaatgacaatcttagacagggaatgtaaacctgaggaagaccactatgagttcaatcttggacaggtgaatgtaaccctgatgaagaccactatgagttcagtcttggacaggtgaatgtaaccctgaggaagaccactatgagttcagtcttggacaggtgaatgtaaccctgaggaaaaccactatgagttcagtcttggacaggtgaaagtaaccctgaggaagaccactatgagttcagtcttggacaggtgaatgtaaacctgaggaagaccactatgagttcaatcttagacaggtgagtgtaaccctgaggaagaccactatgagttcaatcttagacaggtgaatgtaaccctgaggaagaccactatgagttcaatcttggacaggtgaatgtaaccctgaggaagaccactatgagttcagctgatgatgctctgacccatgacaaaggtgggagtagtaaacagcccccagtgacgtgtgccctgtgtggtcctggctaggaacgagggcctctgtagaccagtactaagtgcaattacagtgctgtctggcctcatccattcatctattgccataggcatacttttccaagaatataaagaatacaacagaaaacacgctcttatgctgggaatgactgcagcctccccattggcagcaattaatggagacactttcccttctgaatgagaggaaataaattagtcatttccctgttaatcgcatctaaagtagtcagtttataaagagcaaatgtttactttagcccaagtttccagtctacaatcaattggcctatgggacatagccttgcagaggttatagtgtgtattaaaactgttccaatcataccctaggagcaaagaagagggacagactgtgcttcatgtttctctttgggggcacagtcccagtgacctagtgacttcccacaagaactaagagagttcagctcttttgttcctgggcacaccagcacatgtaaatttgatggaggcatttaaaattcaaacctacacgggtggtatattggttacttttataatttctgtgaccaaacacctgacatgaagcaacttaagggaagaaaggcttattttggctcatggtcagttgtagggtgtgaaaatatagtgtatggtaactgtggcagtggaaacatacgataattgtttatatctcaccaggacaggaagcagagcaaacagaaagcagagaacagacaggaaggagagagagaacaggaagcagagagcagacaggaagcagagagtggacaggaaacagggagtgggcaggaaacagagagaggacaggaagctgagagaggacaggaagcagagaacagacaggaagcagagcagacaggaagctgagagcagacaggaagcatgaccagagacccatttcaaacattcacagcatactaggtaaataaaaggagtggtgtcgaggaccagtgtgttcttcgatagcttcagaaacttttatagaccagataggaatggatttaggttttgaatgatacacactagaaacaaatgactggaagcttcccagctacgatggagggggtgagtaaaaggattcagttagaaaaaccatgatgcagaccaacaggacagcatagagggcatcagggcagaagggtgaaggataaaggagttattagaagaaaaacctgagaaaatcatttttctttcagatggcaaaaggtctgcaaagtctggataaggggtttgaactttattgattacctcctgtagggtaaaatgacattagtagaagacacatcaagaagacattttaataaagaaacggtaagacaaccaaggactgaggactgttgatactggtgaaagcttggaggaaaatatgaatgcaggataaactttggacatttccacttgctttgctaccaaataccaaacaaacttgtgcttttcatttattctcagaataaaggatgcatttccctttgctgggggttccagtggcacagaaccaaccatccaagtcacttcctcctctaatttgagttagagacagaacctgtgaggcataataagcgctaagctagcctgaaggactgattactctgcagaacaaggagcccttttgaatgggtccttactcatttcttctgacattcagaaatatagtcagttggccgggcagtggtggctcacgcctttaatcccagcactcgggaggcagaggcaggcggatctctgtgagttcgagaccagcctggtcaacaatagctagtgccaggataggctccaaagccacagagaaaccctgtctcgaaaaacaaaaacaaaaacaaaaacaaaaaaagaaatatagtcagtaaaattactaagtcttaggtgccatcttagtttcacgtccagctatctgaacttcaagacaaacattcttaaacatttttacattctcaatgaagcaaagataaaaaatttccttcatgcatcaacccggagtgatttgacactggaagtaagaaacctaagtggacatgctaccactcagaaattaatctgatactaagggggaaaggggaaaacatttggaaggatgaaggaattctttataaagtctgattcacaaaacgtatttcctaataaatatcatatgtgtgctctggtaatttaagcacaagtgtgttcatcgatggaaacaattgaaaggcccgctgcctctctgtctccccccgcctatgctgatgctgggtgttctctctggagcagccgggatgggctgggaaggatgggggctggagagtgcagcgcaggcgatgctgcttgtccgggagctgcgagctgctgcggagccgccctgcttccccctcatcccactgtccctgcccccgccggcctccacttcccccgccgccacacccccggctgccgtcttccctcccaagccggttcacccaggcagggccgagcggggaaagggcacccccctgcccccacggctcccccccatggggaaccttcgtcccaaggtcagccacctgggcgcggagggaggaatcaagtctgttgtaccagacaccagaccttgagaatatgctgatctggaatggctctgtgcctcatttgaaccatccaatagaatccctgttcctcgcttgcgtttttttctataaaaaggcacctctcccttggcttgcgcgcttggcctcagaaaagctaagtcgcccgggtacccgtatctccaataaagcctcttgcggttttgcatccaagctcgtggtctcgctgattcctgggtgcgggtctccttctacgaaagtacctcttcgggggtctttcacaatatggggcttagatgtccattgcagaagtcacactgaatggacaagttcatcataaatacttgaaggaagaagttattttacaaagctcattattgtcacaaccatcatcatgaccaccatcatcgccatcatcatgaccataatcatgatcactgtcattaccatcatcatcatcaaatcaccactgaatgaaatgtttattgaacagctataatatgaaaaaacctccagtgatactcagataaataagaaactgtttttcctaaacactttgtttgtaaaatgataaaccatgttttctttttgagataaatccatttgggtagtaataagggaagaagaactacttcaaccaaggttatcctcacagtaccgttgatgatgaatcctctcttttccgtgtcaagggaagtttatcattattcttctctgtgctatagcacaggatcacttggttttgctgtatgacactcctttatcccacacttctcctcagacctttcccccactctttcccccatgtgttcagctggtgtctgactatggggctaagcagaaacttttgtaaaagaccacacagcaagaaatggtgctctgcccactgagatgctgagattcagcctgaagactttgaaaggaacctcacactatttccccaccctggtcctgaggaagtcgcagtgatccaggaaaaaccaaaggatcagattgccaattcatgcagatatatcccacatagacatgcagcctctagcagaaagtgggactctaagcctggaaaggcccgctttgcccaacacagtgttcagggatactgggaaggccaggagacctttcctgctctttaagaaaaaaaaaactgaccaaaaaattaacaaacaataaatagacttttgtccttggggaggacattatgagaacaccccaagagtatggagggggttaggaacatgttaaatattgaccttgtcatgggggggcaggaactagagttatgaccatttcaaagggatgtgtttcaagttctgggaaatgtttaagatgaagttttataggatggatgtggtattgcaaatgtggccatgagaaatgagaaacagcttcttcagactgagacacctgattaaataaccattaagtctgcactggcagattccaggtcaagttctctcatgggtctcacttgatcaacagcagccctgtgaagtgagcagtgcagccggtgtgaacaccattttatcagtggaaatgctgaggttcaaagatgcttgtctgagtaaaagccaggagcaccaactttaggaaagctacactagggatagtttggtaacatgagcaaaattctggaagattctacctggagtttttctctaaggagtgggtctgtaagaaaatcagaacaaggatgcttatcttaacattggcaaattagaagtagatttgtcttttgaataagctcaatttattcacatagacattccttatacttttatactaatataaagggtctttaatcaggcttcagtccaatcagaggcaatccaagggagtgcaactcccgggtctcctgtaaaatttccctttaaagtagaagatatctctagataaaacttccaaagatgatctggcctttgcatgtgaattgcatatataatatatatatatatatatatatatatatatatattcccatatatatacatatatatgtgggaatactatttattttgtggcataaataaatactctcagacccatttccaggtatctgtcgaacagtgttagatacagctctgtggcggaggttctgatccacactctgcaagctgagtttttagagtttctccctactagaagaagcttcaggacacacagcacatcgggcccatctgggtgttttacaaggtttccaggggcagtgtgttcatcaggacccccaagatcaggaaagggaatggccaggcctgcaccatagccttagacttcagtgtgttccctgtgaatgtctaagaagaactctatggcagttcctccagattaaaaaaacaaaaccaaaccaaaacaaaacaaaaaacctccttattccatagactgccttgccagctcctggagtgttggtggaacctcaggattcactcagagggatctactgggtgaggatcacttacaattctaaactcgaaatggacgccattagtgttcattttaaaatccttaggcgccagacatgctggggcccaacctgaaatctcagctcttggaaggtggaagcatgaggatctagggttcaactccaaacccagtacagatgtgggcgtggcctgcagagcctccctgagtcccccacatccaggctgtgactccatgcttcaggatgcctagagaaatacactttcattagaagctgtttggatccagatgatcaaacgctctggcttctgctgtcggggaagggcatttacaatccaggatcacatgcactctcagacagttgaaactgttcaagcaatgtagagaggtttgagaaatgtcatcaatgggaaagtcacaaagtcactaaaagttcctcgctctttcagaaggccgttaggttcctgatgctcactctctgccgtccacctccctgggtctcctctccctgaggaagtgtatggaaagtgttaagagctaataaaacaccctgtcttgctgtgtaaaatgccaggcatggattctgttcaaagcaccagacgtcatggcttctcgtgccactctctcgccaccgtgggaagagaagacttgggggatgagagaggaaggacgggaggggcattcttgcctggaatggtctattccactgcacaaaggcagccaggatggtggttttcgaatttattacagaaaagaaacacataatgtagagactgtaatattcttgccctcctggtctcattcatctcatcttgatctttccaagaaataccacactgtgctcagccaaacactcagatcaaactcagtttccaaggatgtgggaatgaggcgagaaggggccaaccaggaaaagttgaaaggggggatgtttgatgaggagaagaaagaccacctcaaagtttctctgaggcaaccccggccctggagaacagacagaacgtgatttgcagagtagacattactgtagctggtgagggaggcagctcctgcagaaagaactgagcatgctcatcttataaagagaggggtgatcaggagggagagagaagaggagagaagggaagggaagggaagggaagaaaggggagggcaggggaagaaaggagaggggagggcaggagtgagagtgtgggcttctcacaggcacactttacaagtttttccatttcagttcttcaaatattattacaacagatatatgtatgtattatatatatatatatatatatatatatatatatatatatatgtgtgtgtgtgtgtgtgtgtgtgtgtgtgtgtgtgtctgtgtgtctgtgtgtctctgtgtgtgtgtgcatccacattggagtcatttggacttccatttttattccctggtttttctattaaagtatccttttttcagaggaaaattcgagtctcagtaattataatctttagtttgcagggtctagtcaacaatataaaattataatggcaattattttttaaggatctgcttgttatgtgttgcatgacctgtgacttgatgaagtagattgagtctgtggtatttatgtgatatgtagtgtttctttactgtcatttgaagagctaaacaagaattttggggtaggatgtttacaagtatgttagaagttcttctgatgtcaatgtaataggataacattttgatgtttttaaattaattttctttcatactaagggtatatggcttccaaccattttttatttttaaaatatgtatgttttattagttcttcaagaatttcatatgatatgtcttgatatttctcaaccccttttcaaaccttcctagccatgtaacattgtgtccttttaagatttgaacacaccaactgcactttgtgatatgtgtatattcttcaatgtgtggctatccactggactgtggttgacttactagggctatacacattataagagaaattagactctctctattctagcagctgtcaattgccagtagctctttggcccaagatgctacttcatatccaactccattctccatgctgggatttggtttggcttgagcttgcacaggtcttgtgcaggctgttacaaccattgtgagttcatatgtacagctgctctgctgtgtccagaatatactgtttttccttataggcacccaccacctctgtctccacactctttcttctcctgcttcctcagaaatctacgggcctggagaagaggaggtgaagtacggatgttacatttaaggcagagcattatgcgatctcttactcgctgaaccttggccagttgtgggttgctgtgataatcacaaacagaaccttctctggtgagggttgagtaatggccatgggtataatgagtataagagctggtttccttgtacgtccatttagcagaatgatagtagtaagttctcctggaggccctatgacttgactgtccatagtttccatgggttcttggcccaattatagtgtcaagtaagggtttcaccttgtagagagggctgcaaattcagccagaaagtgtttggttactcccataatgctcacgccactattgcaccagtgggcatgtcttgccaggccagttattattgtatccacaagcatttacacataggtaagattggtggttacttttctcctccagtagcatacacagtacctttaagtaccatgaaagctaaccagtaaggatgaggttccagatgactaccagcttgactctccatgttctatgacccaagtctgtgatgcctccagcaacagggtcttactgtcaagttctggagagtaacaaatagcattgacaatgaatagcctgtaatgtttaggaagtgtatgagtcctcactaggcagcaactctaaaaagaagtaacacattcccagaagtgggattcttggttgttagcctatggtgtctagtagggaaatttttagcctactaaacaataatttgaaatcttttgtgcatacacacacacacacacacacatacacacacacaaatatgtatgtatatggacgcttctatagtgttaggtttttatatgagttttacaaaaggttttttaatgttatttattcctccccatgttctttcctctactctgcccctgatccccacggcaatttaactatttgtgttctgtgattcccctttatacaaccaaattaatcttccctcccttgaaagatgcctagatgtccagaaactgacaaatggatattggaaatgtggcaatgttatatatttacacaatgtgatagtattccactgttaagaaaaatgaaaccatgaaattcacaggtgagtgcgtagaactgggagcagttgtaagtgacgtaatccagatccagaaagacaaatatatgctttctcttatttgtggctatcagccatgactcttcagatatgtatgttttgtttgaaataatcatagagaccagggaattttccgctattttctgtaccttccctgtcacttctgtcatgcagtgaatttttactgatgcctcgacctccagtcaaaggatcaagccatccacaattccctcttcagagaagacttagcaaagaaggattgaaggttaaaaccagtttgtagctcttgagtgctaaatagtccaagctcatcataaaatgtacatatgaaggctacaaatgtttgaatttgaaagatttcctaaatattcaaatttacaaagatgagcttctgaaggtgaaacagccttgtacttcacagaggtggtaaggcaggaaggaaatggaaaatgacaatttttttttttctgaaaggataaaactacatggtattagacccctggaaaactccggcctccggggtcccagcccaggaccgtggtcaccccaatctccaggcagattcgaaaacttgctgcaaactgcatgaggctttaatgttgtttaacgagctaaccccatgttagctcgggtctttcacccacccaccatggtgaatggctagcaaagacagctcgaaccggctgcagagagagagatcttgtagggcagcgtaaggggagtgtctaggggtacgcacaggctcaggattggtgtgcctccaggcttggagggcttgccctgtgttgattggccaactggttgttatggcccataggccctcccagggttgttactatgcttgcacatcattgctgtgcacttgtccgtaaagcacacccagagacgtaaagcatagcgccaccagctaacttctaattggttccttgccacgaggcagggatctgactttctagtgactaggataaggtcagacaagctgttatggctgccgaaatggggagctggccccttcgatgggaagaaagtcaatggattgatgggaatctgttctttgaatttagaagaacacatagtcagccttctactgaaaataccaggaactcattttatgctatgtattttaactcaaaactaactaaataaaatgtctatttttcaaacaggattaagccatgagagggcctgcttttcaatgtctattgcttggagcaggattttcctaccaacagttggtgaatgtataggaaaacttgattaatattagcttagaaatacataatatagaatgtcaacccatgctggagccagagggctctaacacaatctgaaggagccagaaagtctttttacaaaaatcatctggatcatattacctaaattctttgtcattcaatagtatggagaacagaatataaacttgcaattatgtctggattatttagctccatgaacacaagagtcattgacatagaaatggagtgagattacaggtgtcagacaaacgggacatctgctgtgagacagtgtcttctacaaggagatgcacccatgaaaatttaatgatgtggtcacccaaatcctgtgctgggaaccaaaaaagttccatttatgtaatgtcttaaggtccagcctcctgtttcagtaaacaggagcacccgggagctccggcctacaattgtattgctaatgcgagcaggcctgctattgtatagcatggcctcagtgtagaatgtctcctagtttggatctctgcgggactaagcatttgattaggcctgcacctgggcgggaggtgaggtgtgtaaattacaagtgaggagagagagttaggagccatggagcagagaggggtcaggagaagagaaatggcctcctagtggccatggaaacatggttaagaaatagccaagaggatgctaaataaacaagagactccagttttgcaacatggaactgagagctctctacagatgacaagatgctcgtgtttggtctttatcgcattgggttgctaggagtttccaagtccgtgctcccccactcaggccgaacttcatggctgccgtggcttggggttggggcatgccggaccacgacagacctgcccattgacaacactagttggcattccaaagtggatgagggagctattttagggctctgcccctagctgaaaatctacaagtaattaatggctactaaaggagggagactcaacattttctagggatgagtgctctgacaggttgtccaaccccaagtcagcagaatgagcaactaaatggattcagtagaacacacacacacacacacacacacacacacacacacacacacacacacacacgtgtacacttacatatgcacatacactcacacatgtatgcacacacatgtacactcacacaaacataataataaagatgagaggtcatgaatttgagaaggaatgggggacaaggaaagtgttggagaggggagaagatggaagtgatataaacaaagtattcatgtatgaaattatcaaaaacaatataaatgtaaatataagtaaaacttgatgactataaaaagaaacggttaagattgcaggaggatgccttgaaggtagattttaggacagtttgtaaggcctggcttgccagagggacctggggatcaccaggaaggcaggctcctgagtcatgatataatcaccaacattgaaacagccctgataacgatagacaatcttctgggattattgaaagctgttcctggaagaagagagtgaaacagatccctgcagtctctacaatgtcagaactgcccagaaaaaggatttagtcttttactggatgaaagccagtgacctgcagagcctgtgaaatcctgttctgtcttcaaaatctgacacttataaggcagtgacaggaactatacatatatgcacaacgtttggctattccgccattagtgaatctagtagttcttctcaaaaagtgaaagctaaaccagcgttagttgaccaatatacgcatgctctcactaaatgtgcctttgtaagatccctttgactctagaatggtttccttctgggattcgtgcatttgattgcagaaaatagaccaaaatattactaaaatagaccaaaaactttggatgctgatgttgcctgaaggcaagaagatttgggaagccatgggtttcttctgcagctaatatttcctttgcctttcttagaggggagaatggggattcctgcaggtgtgtggccagaagccaggatgcttgaagcaattggaggtcatcatcagtacagagtgccagacttgagattttaaattctgcactagactatcttgggtctctccccatcccttccgtgtgtgtgtgtgtgtgtgtgtgtgtgtgtgtgtgtgtgtgtgtgtgtgtgtgtgtaggccaggggtcaataatttatgtcttccttactcattctgctttacttttttgcgatagtgccttgcacagaacacgagcttgctgacttgtcaagagtgtgaataagcagtgagcagagggacaccctggttctacttctccagcgctgggacgacaggtatacactgacacacttggctcttttcacatgggttctaggcatccaaatgcaggttcccaggcttacacaacaagtgttgtacagactgagctgtcttctcagcctctcagctgcagtttttaaaagaatgcagactctgaggcctagctcaggccttcagtctcaatctgtggaaagtaacagtgttatcagcactttagacaactttgggagattattttgcacaccctgcatttgtaaaggaagtacattgacaacaatcataacagaaaatcctttacttagggacaggtcacattgtactttattttattttgtttgtttgtttagatctttcgagccagggtccagtctagcctagagctcactatgaagctcatgctagctttgaactcccaaagattctatcacttcagcctctgtagtgttggaattacagtcatgagccatgtcactcagggtctggtgcacatagttcaaccactgtcctaccactgagctacatattcaatgtgagtaattttttatgtttagttatgtgtgtgtgtgtgtgtgtgtgtgtgtgtgtgtgtgtgtgtgttggaaactggacttgggttctctgcaagaacaaggcgtaccttgactgctgagccatctctgcaggccacaggtgacacctaaatgaacaggttggtcactgcaattctctttaatgtttcaaatcacacaagaagaaggtgaggtcacagttgttagcatagatgaaaagttctctccacacgctgctgcaaggatttgcagcttatcccatggtgataattagcttgcacacaactaattgacagcattttttctcttcttctttcaccttctcttactcatttccctttatggagtctttcagaaatactcagtttaaatctcaaggatttcactggcttattagatacttcttcgtatacatctcagcacctgaaaacggcaactattgcaaacagagctgtaagtgtgggaacaaacccaactgagctgtgaaaacagggctgccattacaggagtgcatgagaaatcctgttggcagacattcacggtctatgaaatgactgtggtttctagaatcggtctcagagaatcagttaaccttaccatttagtgagagtgaactcactctagtacacaaatatgcaatggcagtcacaataagcaattagggcacatgtcctctgagtggcagacagttcaaatcaagccaccctgtctatgaaccgttagaacacaatatcttcccataactgtcttttgggattaagacactatcatctcttgtgattggaagactctttcagtcctctctgaagaaatttcatccctgacaacatgctgcaaggcctgcactgtctgtctgctcctgtgatggaggctctacaaccaaatgcaaaacacaaacacggagagggttagcatgctgtgtgacccttagacacgagatgcctcgttatcccgctacaggagcgcagagcacagtgaagaatggactggccagcccattttgatcatatctggtataactgattttaaccctgggcctagagatcatagtccaggcctaatgaaagagatgaaagtgagataaagagacaagtctgcctctgcctaagtcctgtagaaagctggttccctctagaacaggccatggtggccttgaactaacagagatccatttatctctcttaatcctgagtcctgggattaaaggtgtgtaccaccactgcctgatctctatagcttgtggctgactttgctttctgaatcttcaggcaagctttaatacatcataaataatatgtcaccacaagtttcttctggtgttgctttgtagaaaacaaacagcagcaaccacaaaaaccctcaccttgactggtaaaggccgacttgtcatctagccgggactccatttcatcacgtgcttgtcttcattctcaccacttcagggcaggagggattcttttagtagagagttacaacaaatgtcttcattcacaatccccaccctccacccctccacccccccccacttgcagggcaaactctcgcctcacctattgagccttcttgcaaatttctgcccagaatttgtataccccccatcatatatgatctcagtatcaacttggaatacttgtattgtggactcacactctcttttatttatatacttgctcatgcatgtcttcagtataaatatctcatcaattccatcatcctacttccaatgccgctactgagattgcttatgaatgagaagaggaatgatgcaagctctaggccaacagcacttaatcatgggtctttaatgagaatgaagttacagagtgtgacccagattataaactaaggagcaaaagtcatctagcagacgggacagtatagtgggaaattaccaatacagagtcaggtagaaatataagggtatttaatagggaaaagccttacttacagagcgaaccagccagccggtggtagtctgtacagcaagaagcaaagagaaaccgaaaacgaaacgcagtccccctactcactctgaccacgccctcacaagcctggtcaggtactcctgtagccagcccctaagaaggcgtggctacagcttcccctacaattccccttttagtctaaaagaggattaaaacttaacagtataaaggtaaaatataagaagatacaacaatctgcttatgtcacctcctaactatctattttgactaaaccctaaagtcatctgaaagaggtgtccaagcctgaacacctccttccaaaccgaaccataaacaataggaagctattcctaactaggtatacacactatcctaagtgacaacaatggggaaagggggcgtagcattctctaagttacttcctgctgaaatgggacgatgatagtcatgtggggtcctgtagaaagaaaatgttagtatccagtccatgttagatgggattcacttgattgaagatctcgcttgaaatcctcaacttgattgaagtcagtactcgaacctctggccggagtgtcagttgaaatggagcaagttggatccagtgcagtcgaggaggtgtggcccattttctttccagggtgtccagggattgctgtcaggcaggtcttcattggctgtgtgggactcaaacataaacagttagcagagaaatgtttgcttgtgtatgtacacatgctagggaatgcaaccatgagagcataacaattatgaaagggtgtacaccttgagagaaagatccaagaaaagacaaagacagtccccaaattcttcttttattctgtattacatcaattggcttcttgatacaacacagaaacactaaagcttagttaaataatgtgcttggattttagaggaggaaagccaaatccacctctaaatccagcattggtttaattgaatagggactaggaaataaagagaaatagagttttttgagagacagctgtaaagtttaccgtatggcacattccttttatttgatggttatagctaccttttattcttaagtatctacccatgcagtgttctttgccttttgaagatgagttttcctgtgaagataaaagcaaaacacttccctttcctttgggaggtttatatttagtttataagatatatcttagtagaatacctgtcatttgtcctcgtcgagaggtttatcccacttctgacaccagatatagtgggaaattaccaatacggagtcaggtagaaatataagggtatttaatagggaaaagccttacttacagagcgaaccagccagccggtggtagtctgtacagcaagaagcaaagagaaaccgaaaacgaaacgcagtccccctactcactctgaccacgccctcacaagcctggtcaggtactcttgtagccagcccctaagaaggcgtggctacagcttcccctacaggacagcctttagtctttgcagatagatgcttatggtagcggtcttcctctttaggtttggggctattgagactattatctttggtccactggcaaatatattccctgtggtaacttggcctgcttagggtgaacatcaggaactttaacctcataccgtagagcaatggctctcaacctgtggatcacaacccctttgggggttgaatgaccctttcacaagggttgtccaagaccatgggaaaaacacaaatatttactttacaattcatagcagttgcaacgttacagtaatgaagtagcaataaaaacaattttctggttggggatcactacaacataaggaactgtattaaagggtctcagcattaggaaggttgagaaccacttctgtagagtcttgcacctcaagtattttttgtgaatttgtctctcaccattcttgaaatcactcagagaaaaattactgtggtcttttttttttatttatttaatttttacttgtttgagctccaaagtactgaatgtgctgagctatcttcctctgcccactgcattcagaatcttctgttgcttgcatcctgtgcaagggaaccaagaatcttcagtactgatccgtcaaaccctgtgctgagccaggggagccctttcgtgtcaactgtttcttgcctgggaacaataaggtttccattatcaaatgctgccagaacattttgtagacaaattatccagtgtctgacagaacaaatatctgtgtttatcccttttctaaagtggagtcatttctcatatagtcaaggaggcttcatggaaaccatcattcagtttgcccagtattcattttccctttcatcagtgagattatcagctcacaagaattctttgtactcgtaggctcagtgcttaaggtcagaaaaagaggggcaaagtcaaataaaggtagattttagtctggagttttcttcaggatttgattgcctctcactagaaacttccaatgttaaaaggacccaattcaaaacatcaagcaaccctctttatgaagctcccaggcaggagcctgctgacattatggagatgttacagcctctaggattttgtttttatttgtgtgacatttcctgagctcttggacagacagtatacatcatatgtggccttagattgtccctgtcagggctttgtcagcatctccctgctgtgctgatttagacacagaggcaggagaagccctcactccctgccccaccctgatttccagaccaacatcttgaggaagccaggatggcctttggtttagagtggaccaaactgtatatgttaaaatgtagtgtacttgtttttctctcactgaacagctttctgactgactgaagctggttcttttgaaaacacaaatgtgatcagaacttaaaatcaggactctagatgattttacacgttattcaatatgtagtaccagactgaaggaaaatacagatatgtaagttatattccttttccttgcaattactttgtatgtacacttagtcttcagattgatcctaatgaaggaagtactattctcccattctacagatgcattcaaggagttgagcaaattcccagagtcacacagtaaagtggcaaggatagtacccacagcctggacaaataattatgctggtaattccaagtgccagggtggtttggtgctagtatatagtgatgagcataactgccttccaaaatgccattattgttaggatttgtgattgtctagatttctaacacgaaaggacaagtctggtaaactgctcatctgtgcaagtgtaaagctggcctgggaggtgactcatgcacaagcccgagggcctggcttcaatctctagaccccgtgtaaaaagccagcagtattggttcacacttgtaaccccaaagctggggaggcagagacaaaaggctgctggggtccactggctggctgctctagccaaatctctgagttctgggtctcagtgagagaccatgtctcaaaacacaaggtggacttcacctgaggaatgacatcagaagaagctgacctctgtgttccacacatgcacacgcctgtccccacacgtgttcacttgcacatacctggatagaagcacacataaagaagagcatgtatttttattggtgtggaaagattagagcacattttggagtcacacaacggtaggtaggcatccattgctacagaaaagataaaactttgtggtttgtatacttaaatgtagatataaatgggtatttttttctaaatctcatatgaaatctggggagaaatttatcacaatagtaagtggttatctgtaggtattaggggaaaaggtttttctttttttaaatgtttttctatgcttaatacaatcattgcagattgtttgatttttaaagtcagacatgctatgaatatagagattgtctctaaaaataaatcgttttgtttgtatttaaaaaatgagttcttttgtgttacagtgacagaaacttagtttgtattatgaaatatcaaactagcaaccatcaaggaaaatgctctttgtgcctgtgggaaaccccaggaaaagacccaagagttgggtgatacccctggctacgagcgtgctacatagactcactgggcccaggatcacagctaggcattcactttttctagacattatatctcataagagatggaaacaatcgttctaaatttaactgattggaaaacaggaagaaacttagacaagtccattgtataaagaaactgtaacctatgaaagtcacaaaagcccattttcttatggaatgcccacaatggaaacttctcaaggcacagaaagtatccctgccacggagcctttatagtactctgggagggctttttaattctctaaaagattaaacctcaacagacttgggcactcatactgggagtaactagtaccatggaagtggcctttacagctgcaggagatggagggtttgagatgggctcactacagctttgtgtgaagactcagacagctgcggatctaaaccaacccttacctgagatgacagcacacatagggaatctctattgagtctgactccatctcctgtttcagttttaaaagcgatccttagaactgccccatgacattaaattgcctggagtggagccattctggacgtcctttctttgtcccatgtcccttgtatcagcattttctgagccccccactcctgctcccagcctttgattcctatattttctttggatgacatggcatctcccaggaaaccaaccttctcttggaccatcatacctgtaaaatgagctatcagagcgatgttgttgattctggggtgatcagggaaggcttcatggaagaataagcaaaaggacggattttgtacaggagaacatgctcagcttaataataataataaaaaagcagcaatagctgaaggcccgggagaggctggaggttctgtgtgtaggagccatctcaatagaaaacactgatggatggagctttcatttttattgcctgcagccccttttcatatttttaatgtctccaagcacccgcctagccaagtgcttctttaccagcttgctgtctcttcctctcgtccctgcacgctgaggtcaggccgtggagggcaaatcctcatcttctcagtggaattcaccttgatctttgtggatcagcccattcttcctgatgcttggtccttgcagtaggttgctcacttggaatttttcataactttgtctcctagttacagttctaaagtcctggaggagactgagccccaggcacagcacaacgcatatggcctcatattacactttgtagcctatttctgtccagagctgatccggcaagcaggactatctcacatctcttccaatgtgtggtttggggtggatatcatagctgaagaccccgccctgcattcctcctcctcctcctcctcctcctcctcctcctcctcctcctctcctctcctcctctctctctctctctctttctctctctctctctccttccttctctctctctctctctctctctctttctctctctctctccttctctctctctctcagggggcacactcgaaagcatgtgtatgtgcacggtacagtcacaaggtagccagagaaggggtcttcctctaccactctcaacctgttacctagagacagaatatctcactgaactggaagctggtgttagggttagggtggctggatagccagttcctaggtccacctgtctgtttccccaacaggtgctgttgattcaaactcaggtcctcattggtaggacatagatttgattcctaactgatacttcctttagttgctgtctaggaaaactgcagtcaaagatagtcaaggaactgggatatggcctaaggaactaggtctaagtcagtcccccatgaagggttttgcctgacatggaaaggattagtttgcatctattggttgatggagtttgaccaggtgttgtctactgtgaggtagaggaagcatgggggcagaagccttcttacaaactcgttgacacatgtgtgatatttttgaccttctttgagttggggataattatgactttagttctttacaacatctccccacagaaaatagaaacaatgacattggagacctgagagatggtggttaaagcatttgttgagcaggggtcacttcctagcacccatgtgtgacagctcataactgtttctgattccagctccagaagattcaaggaggcacacacacatgcacatgcacgaacacaaaacagaaataattcaacaccctttcctgtctaccccaggcacttgcattctgcatgtggaagacacacacagctccacattcacacacacacacacacacacacacacacacacacacacacacacacacacacactagaaatatatctttaaaaacttttaacacttaaatggaaaagtacaacaagcaacagtatggaaataaattttctataaccccccaaaggaaaaaaagaagttaacttgtttacagctctgtctagctgtgagacataatccaaaacagcagaaaaaacatcaataaattgaaataggcaaggattgttaaaggaacagtagcatttaacaatggcatttaaaacagttcaagagaggtagagtgtgaaatcagactcgacactgttgcttctgagtccctggatccacatgggacaggcacacctgtttctatacacctctagacgagcaccactttcccctctgcctttagactgactgacatcatgaagctgccaggacagcctacccaataatggcctttcctacttgtgcaaaccatggactaataagccctacatctttcagatgagtggtggaaatgggcatttttaaggttgtgcttttcacaggaagtcacaatgcaccatggacagatgatttcgattttgtgggacacagtgggcctttaatgtctccagctttgggggatgttaaattccaagactccttcactatcctaaagaaaaagtaataaaacatgctttgggatcaatttgtgcagttcgagaggcagagatagatgaactgtttggaggagggcaagacatgacctagacttccacctgaataaaagtgactccatattgaacttttgtaaagtttaaaacataaaggagtagaaactctcttgctacaaagatcttacaatcttatattatccatcaccgtgagaattcactgggctaatgaatctctatgacagtttgtctttcaatgccaaggtcttgtccatcctgaacagagacacttgccactgaactatactatcagcccaatcttaatgttgtggtctgaatcaaagtttcaacatacaatttctttttgtctgcaaaacaaaatcttcttgcccttggaattggctgtatatgaactagagtggactgtgtatatgctgctgtcaagagcatcagtggaactcggcatagattttctcttaggggtttgaatagtaagtgattaatttattttcatcattcatgcagtttggtatgttggcaacagactgagctataaggcaactggcctagattctatgcttcttttgtggctttggaatacagaaaatgctatacacttttacaagggcatctgtacacacaacgagatagggtccatgggatggccagtcacaaggaaagcaaggtgtcatagaagaaggtattatctgaggacaccaagcctagaagtcagtttctggccacacttgtttgaatctagacaaactgaattccgaacagattatatctctttgtgaaagtgaaaggggagcctcttcatgtttgtaagtggctgccatgcacagtcaaccacagtgtgtgccagccgtgctatgccactttctggtgggctaggtgtgccagacattaatggaaataagaaatagttcccaaactgttagtgtgcatatttttgcaagaaaacttgagctttattcaaagaagaccttgattttctcgggcactttttaatatctctttttctctgtgctttgacaacaaaaaattcaaagtgtgctcagaaatgatagagataaaaaagaaagggcagccaagaaatgggagagagacagtcttcagggaccggtggtttcatgaccaagtggcctgtgggtcacacaggaggagaggacaacctagcacttgcacgccagagaggcttagcttgtgttctctggtaggtgtcaagaagggtggtaacctatctcaacaccttaggatatgggcaaagaggagtggctcatttgaaataaaagaagatagcccttgatggagggaggatccaagagatggggatggaatgctagcatcttactcaacgaattgaattttaagatgaggaccacggcaaatctttctcatcttgtctttggaactctgagtgagcatgcagtgtactctatagaaaaaggctatgacggaagcatcaaagacgtcgctcaagccaaacccatgcattttgggctgctttctttctgtgattgcttaatcgctttctgagggtctccccgtggcagaagctggctggagttcactgtgaagcctagggtggatttatagtgcctacctctgcatcctaaccacactgttacaggcatacaccactataaccagctccaattcttatatattaaaaaaaaattaaatgagtttgccttgaaaagcccatatccactccagggcacacactaatgtctttctctctctgactttctccttgtttcttaatgctcatattaaatctatattaattttttcctaataaacacaaactatgcttgaaaaataaaaattaaaatgtctattcactgtctggaaccaataacacactttcagcagctcttataacctgatgataaatctgcaaaaaataaactttaatgaggctatgtagtgattatagggggattcaataaattaccctccatacttttttaaaaatcttgaaatacttcagatgtttatatatgaaaaggaagaagggaaattatgagaataaagggcatacatggtattacaagttcagataatcccactggggctgtatttaagtaactggttttgagttccattggcctgaaagcgaggtgggactgccttccccaggaatctctgaactgagtgggaacgcaggtggtgtgatggaaaacgttaaggacttcacctcaagcactctagtcctttatttccccttgttgacttgaacaaaataaatctacatgcccataattcctcaaagtatctgtttcttgtggttacacgaggcctaaaaatatataacatatgttgaagtttcagagagaaacaggcccagaaaaacctcgagggaccctcagctgtagttacgtgaaagcttgtgtctgtgcctgtgcttgtcaggtgctgagaaagacaatgctggtgacagatgtcattggtgtcatcatctctaccctactgcagtctctacggtcttctctggtttactcaagaataccaaggagtctacagactagatgatcagtgtgtttctcaaagggatccctccacaagatttcatagagcttaaagtgactgtttgcagaaaacacacagcaacttatttactgttgtccacacctttttttttctttagctccatatctcttagttcaccacctctgcacctcgtaaatggtgtatcatgttctccagcagctgagtcatcaaaaaaggattaatgaaaaccacaccccagtgtgggtttggatgctgtttaactttctcattataatagatcatgcattcaggtacagctgagtccttatctacactgcaatggcattcttttatatcaccgctgtattttatcttttctgtaaaaaaatgtttaattttttattgtatgtctatgagtgttgtacctacttgataaatgtgtgtaccacatgtaatcctcatggaggcagaagagggtgttggatcccctggacttggagttatagatagttgtgagctgtcacatgggttctgggaactgaacccaggtcctctgcaagtgtaacaagtactcttaatgacagagctagctttcaactcccaaacaaattttctattgagttactatactttgaaaaccttccattttttttattttagaagttcataatttgatgaactgttggatatattctccaaagaaaatgacactggaaatgtgttctggcagagttttccctgttgaatggatgagatgggaatatatgttgagattacattggtatttacttccatgttttaggtcttaggttacacttgagccttcttttattgcattcaaaggaataacaccatttaattttttccggggcgggctgtttaacagtccctaaatcagatatttagttattatctgttttcttatatattgagtgaacttggatcccgttagtgaggaagttttgtttaagagagattcaaatgaagtgtgtgggtgttatttgtccttctcttcacactttctcacccccaaatgtaggcttatcagtttgctttcagttccatacaagacttgtatttctcaggcatgcaggttatgacattttgttggtgacaggagaaggtgacccaaatttagcctgttaagacattccaaaatgactacatcctaaatgtgggtgaccttgtctagatctgctctcgagggaaggattacagtcaaggtcttggtttgcacagctttaccttagagttgttgaataaagctggcttcccggtcactgaggttgtgaactacagtttcgtagagctgaaagaagctatttcagcagtggttgtcgaagctgtctagtcgactgtgcatggacttagggttcttcttgtcttcaaatctagcagcagaggatggagacctaactcctgctttaaaatgaatctctctcgccccctcccctcctgtctgcctggttgcttctactcctcctgatgcatctcccttaacccagcaggataaaattctctcctagtagagatccacgtgatttaagcccatgcagacaagctatgataatctgcatattcacggtctctagcctcaactacactggattacttgggtgctcacacacagcgtagtcaccactgtctgccattaggaagtgggaattttagatcagggaggccggctcttcttcccaccagcgtgggagatgttttatctttctgagtagtgtggatatcagaagagaacttgagagaaacagacttttttcttatactagcattctctggggcaagataaagtgttaactggtaacaaagcatcctgtggaacgtctcgtggtagcacattaaggagaacctctagcaagtactgtgatagctacatagtttgacagtgttttctgttaacaatgtatgctggctagtctttatgtcaacttgacacaagctagagacatttgggagaaagtgccaccactagactggcctacatgtggtttcacttcactcctaaaaaatgtgtccccatgtaaaagctggcacagtgtcgtactctgggtgggtggtcctagatagtagaaggaagcagactcagcaaaccgtaaggagcaagctagcaagcagcactcctccatggtctctgcatcaggtcctgcctgaagttcctgccctgacttccctaaatgaggggaaacaagctgtaaactgaaacacatccttccttccccctgtttcttccggttacctgttttaccacagcaatagaaaagcacccaagacaaggggaaaaacatggctctaagtcctatcaggcttactttcccttggcttaagagtggttttagtccatagaagtttgtaaaaccttagcaaatgatgagtgctctttgtttaatggagtgtttgtggttcaacaaaagttattttggtgcaacacaatgttgttaatggtgcttggtagatagctttgtcaacttgacacaacctacaattgcctgtgaagagaggggctgcctacatggagctgacttgtgggtatgtctacagggagaattgttttacttcggttgactgatgtgggtagacccagcccactgtggacagtcctaatccctaggcaggggatcatataccatgggacttgattttacttcacaaaaacattatgaggcaatggaaaaggaatttttaattttctcctgatgaagccgatacacccagaggatcaaggtcttatcttaaaggcacacgaatgtcaaatgcaattggtctgattgacattcagcaacataagtggccatgagatcacctgacatctcccacagggtgaagcaggagctttttgtaagacatcattgaggatgtcctttatcttgtgtattgttgatgagatgagaagccccacgaggtgttccacagaatttactagttccgtaggtacttgcgaagttttgagatttttccttccacatactgtaatatagagattccagctgaattttgttactgggcacatttgggacactgggggttaacatatccctgcttctcttgcctgcccagcttccctcacagcagggagcacaagccctttcttcagtaaccccctcctccttcccctcccctcctcctctccaggagagtttgagctgcactgagattagctaagaggaaaatgctggttgataagccaactggagcgataagtctgttgattccacggaagcttgaagatcttgaagatctttctaacttttccagaccccacacaactgaagggtgtggggtgggaggtcgccttgctcgatagacaaacagatcactccagtaactcccacttagtctactgattaggaaggctttgtgctcagggagggaggcgccctgtctccttaaccctgctatctctggctgccttttccagtcaacctagcagttctcctatgtttgttttggtggttacacaatgggttcatttctgtcagtctgttagaaaataccccatttctcaccgaagtacgtgggtgctgtccatccaaggacaccatcttccattagtctctctgttctcgtgggcgccctgataagacgtgaggaagatgaaatccagttcctttctgtggaggaagatgctggacagaaaagactttacagagaccttcatgacaaagatttttctcagaaaactatactgttttattctatctatctatctattttgctcagtattattggcttttgtggtggtggtggtggtgtggaagaaactaaagctaggaacatcttttaatatacaagagagagtttgaagaaagccaaagacctgaattctttgttttattcctcccattagaagcctgatgaagaaaaccaagagctgctatctccagatgtccatagtgacccgcagcagcatgagccttatctcagagaaagggtaagctgctggaaggagcagaagcagaagcagtctcagcaccctagtgtagccaggaggccttgagagcattgacactctcccctaatagccagtaacagccagtaatggtttctgtatgcctttggtagtcctacacagtcctgttgtgctgttccccttcccccaagagttttcccagtcccacccccaccctgagtcttcctggacccattcctcactcccaccctgagtcttcctggacctatctatcacccccaccccaagagttttcctggaccccatccctactccttagtctctcccaggaccccacccccacaccaagagtcctcctggacccatcctcacccccacaccaagagtcttcctggacacactaaactctcagctattcacctccacgggtgtcaactattctgaatagagaagagaaaaatgccttcacagattctcttgggtgtaggcaacgttttgggaaaagggagttaaacctgttttatccaaacaagagcaaaaacatggatctgagccaggcagagcaccatagagggctggaccagtagccttcaagataagcagcctgtgtgtgttcgttcataaggtgaaaacaggctggggttgtgctcctggggagcagctggggatgcagaagagaggccttgagcctacttcacttgcctccgctctagggtagctgcggaaggaacgctgttctgttttgttagcagtaaggacaattttattattaaattcatcatgtagcccaatgggaggctgataatgcccacccagaactcctaaagtcacatattagatttcggcttagatttcggtggcatttattcccttgagtggagagactacctgtgttgggatcaagtagaattagtttgaatcttgcttccctctgtcactacctctgagggatcaggtaaattctgtgactgccatttgaaagggggaaatgaataaaagtctaaaacccagactccaagctcagcagacaaggttaaacaaaggtccacaggactcaagcccttagaccagatatcacaccctagaatggtgtccacattcctctgctccaaagaggatcagatagtaatccattgtagaagttcccagcccaggagcaattaacaaactcatttcctctgcagcatctgcttcattgcaccttgcctgaagcacacaatctttgtcctgtcctgtgtagtcatggaagttttgtaatcttggggcttccagccctacaattttcccttataaaaacacccctcagtcgatattggggactccatttgttcccaaacgaatggggtccttgcttcagctcgtactctccagtcaataaagaaacttttgtccttgcattcggtgagtggtctccttgttggcgggttcttttggggttccgaaatctgggcacaacaccattaatctttcttacacataacactgagaaaattccaatcctgtagttaatttaaggatattgggtttattctcttcaagatgttcggactcatcagtaaattgaaccatgtattacaagggtgtctcagctctgcctggggccaagagacagtgttgagaagtatttgcatgtctgacctgccatcctcccttgtctttctctttctctctttttattattatttttaatttatattttaatttatgtgcactggtgttttgctgtgagtgtcaggtcccctgaaacagacagttgtgagaggccatgtgggtggtgggaattgaaaccttgaaactgggtcctctggaagagcagtcggttctcttaaccactgaaccatctcttgagccagccctgccccttgcatctcttcacggctttctcatttcagaccagtattgcttggaatacatcatctaacccactgctcagagttgctgtgtatcttcttagtgttgcctagtctcacacaggtttgggcttccctctctgttgttgtgttcaaactcttcagagctggggccaggaggttccccgaggactccggggtgagtgttcttggtcaccattggtaactcatgaagtgagttactcaatttgtctagcctcttgtgtagtcagcaacttctcctcagtgatcaccaggtggaagagagccattgaccagaggtgacttttatgcaatacctccacaagccaggaccttaccaggtcatctaactttatgtgaagaccagcaaggcgtggtactggtgcttctcagtggagaaaactagctaacctccgatagggcacattaatcataggtcatgggcctgaccatcttaatagcccacacactacaaaagagtctacgtggagggtgataggtccaatgcttcccagcgcatctgattgagatgaaggaaggaaggataaggtgctctgggctttctgggatgatactacatgtcaacaaatgatggctttgggtgggggcacaatctagtttagtcttgagaatagatttttaaacaccccagagtctgccctgtgtgtgccagacagacagacaggtacagagagcatagaaaggtgaaacaccatgctcttctcttcttaggcatctgacactgaggcaatgtggtccactgaagaagaaaacctgtgattgaatctcagagaggtcatcctttggcagtcagtgtcctcctcacagagttgctgaagcttctgaggctcaggcttgctcatctgtaaggtaatgaaaccctccattgggttaatgccagctatggggaggcttagtaataagggtgctgttcttagagacttgtacaggttctaactgtgtcagacgggatcctcgttccctttgctaacatttaccatataagtgggctggccatagtctacctgagaaatgactgggaagttaatgcaaagcaatttgtctcagtcttactcaaacagatacacagaacagataatagaatgggaagtctaaagtacaaaggctaaaactcccaatgtaatgtgtgggtttgaaggcaaataaaataaaataaaaacagtgatgatattctattgtttactttggagggccatagtgcagtgttgttttggttcatggggaaaccagggatgtgtctgcagggatcaaattttcctgataattttcttcaaacatttcttcaaataatattgaaaaagggcccaccaatatatcttgctaacacaggctgttcagcaaagaaagaatgcatgtctgctgtagtcacttttcaaaaatagccgtggaagagtttggatccaaagagtgcctgccttctagacctggatccggttttctataagagggctctgcttcaagtaataatatgtataagggaagactagagcagagcccagccctgcccccccaccccaaacccccagctgatacagcagctgggattaaaatgtaacttgaactcaagttcttacagatgagatgagaactgccatttaagggtttccaatggcaccaagtggattagagctgctctggagacaggcgtcttttgacaatccccgaaaccatgtctgtttcctggagggcagagtggattcacgcaaagtcaattaaagagctagctgcataaaagacggtggcttgacacgattcacggcacacttgccaagagtctctggctccatttatggggattttccctgagaagtagcagtgtggatggtgatctggaactgaaatctgaacatcaaggatgcatgtgtaggggtggtaactggactcatgcctgactgcagagggacatagacattctatatctgccatagacgcttcgaggaggataattcagtctgacatgaaactgcattttttaaaaaaaatgaagccctccctttccactaacatgtgagtctatgggataaaggctgctctgtgtgtgtgtgtgtgtgtgtgtgtgtgtgtgtgtgtgtgtgtatgatatagtgcatgggttgataaccataggtgtttctgtccagtgtcatttctctgtgttctcttttcacaaatgtcaaggaatgatagatatctttgtcatcggtggaactggtattgggagagcctcactggtttaccaaggatagcaatcagaacagaatacccaagagcacatacgacttctccttgaggaatcaggccataaaaatcctgtgagacatgggaatgaggtagatgttctacgtaggcattcacatatgtgcaagtccgtttccatgtatgtgaaaaggggaggggacagcctgaactgtcattcttcaattactgaccatgttgtttggttcagctttgcttttgaagcagggtctctggttggcctggtacttgttaagtagactactctgacttgctgggaagtctcatgcatgtttaaagactatggtaggcagagcctatggctaagcattgctaagagccgactatggggccaggaatagatactggatagaatactaaaggctataggcttctgattcgtctaatcttgtattgctaagcagcagctaccactatgcctttgtgctggctttcagcaacttgcaggataaagggaagaacaaccgtggtaaccgggctctagacgccatcatgtgagcccttaagcaagctttaaaaatctattacatgagacaaattcataggcttgtcatttaggagtgtttcattttattcccaccacctctacggccagaaaagtcctcagtgacactgaactgcgtacccaaacctttcaatgggaacaaaacaaaacaacactggggcttagaaagtttaactggctggcacaaattaacacaatgagctgtgagatggggccttctagacagatgcccctgtcccctttaacagtggctcctgtcagaggtgcttctggctggcaatgctctacccacagctgccagtcatccattctggcctcagtattcctgagccaggagcacagtcagaggccacagtcagcagggaaggtagcggagacctcaaaggaggcatatcttgactgagcctgcacctagagggagcagctggaattctcaccggctgtgtgaccccagaccctgggaaattgagggtgcttcctccactcccacagacctgcttacagttggtctggggccctgagaacaataaccttgatcccaaacatctcctaaaggctcatgtgctgcagactggttcttcagcttgacatcattggaaactgataagaaaaaatctttcttgggtcagtaagggcatatctctgcccatctctgctctcttccatatcccaggcagcaagcaaacatttccacacttccactaattcccactgtgatgtgcccacccgccccccttgccacaggcccaaaggtgacagggttgaccagggactggaacctccaacactgtgaactcaactgaaccattgctctttgtagggcagttctctcatgaattttgttacagtaccagaaagttcatgagcaccctggacacaaaggaacaaccctgatactgaacatacagcaaacctcgatgagtgcctggcctttaaagcattagtttacatttgttgtagcaggcttcacatttaacaaaaaacttcataatgttggagctggagaggtgggtcagctggcaacacacctgacaggcaagcagaggagatgagttcagatccccagaatgcacacaaaaagccctatgtggtaggtgctggggagttgtagtcaggatgttctctcgagtttgactgccagctagtttagctgaatcggcaagctccaagtttaatgagagaccctgtctctaaaaataagatgaatgggcccagtgagaaggctcagaggatagaagtacttgccacacaacaacacaggtctgtcagtcttagttcaatcctcagaagccaagcaaagtcagaaagagagacccagcttcatctccacaaggttgtcattgtatggctctcctctctctctctctctctctctctctctctctctctctctctctctctctctctctctctctctcacacacacacacacacacacacacacacacacaccacacacacacaccacacactttcccataatgcctagtaataagaattatcatattggtttttttttttgcaagatacatctagttctgatgaaagttttgtaaaaagtctagggattccagggaacagtgctaataggatgtttcctgtagtgtgagcttttccttgttatgctacttggatttaaatcactccgtcctctggtactaggacctcagtactttgcttgaaaaatgaggatattgcacttgttttatctatttaatagtcattctgaggacattaggaaacaggccaagttaacgtaagatactgtatttttactgcatctggtcagttctctgttgctgcaacaggacatctaaggtaatccatttagaaagaagaaaggcttattttgggtcacagtttggagattccaacctttagtctttgtgctttgggggtctttggcaagactgtgcaccataggacaagtgttgttcgagatgatgctcacagaccagcagctacaggccaaaggaaagggagagacgcatcccaccgcctccatccagccttcaacccacaaataccctaagacctcctgtgaggtcacagctccaaactctacaccacttcccagtagcaccaaactgggactaagtctttaacattagaagaacattctagatccaaattttgcacactgaaaagttattttcttttttactttttacactggtgtataagagagtggatgccttatgcttgcttatataattctcatgagttggaaagtactgagatttgcataaaataaaagttcttagtcttctctgactgctggcagattcgggcctgaaacgtgatccgtactaagtcagtgccatggaaacaaaccatcacttcatggttgcctctggcacaagtggatcaaaacaaccaatgcaacagtgggcatactctagaaggagaggcttcattcaaagactgcacacacacatatggaaagtttcaaacgacgagggaagccacacggagacagcaccactccctctacttgtgtcttcccacgctggagggtcttggcattttatctcattgctaatcacttttgaagtgtgtgtgtgtgtgtgtgtgtgtgtgtgtgtgtgtgtgtgtcgtatgtgtaggtgcatgtgggtgtatacatacatgtgtgtgtgcatgtgtggagtccagaggtggatgctggctgccctgttctattatttcttgcccttttcccttgagacactgtctcttcttgaacctggacctaggatggatgacagcctagaagccccaatggtcctcttttctgcacccctcacggctctgggcttacaggtatgcatggccaagcccactggcttacatggatgctgtggaactcagattcttgctcagcaggtgctgtcacagaccgagccattcccctgtcctacagaattaaggaccacttcattgctagtgttagcagacgttttcttcctctgttgactccacttccctgaccctcagggccgcccccactgacacattctccttatgtctgcagaggagtgaaggggtgagcacagctgtaactcaaccttgttgtcatcattgctatgtctttgtgtcagcatccccagcatcgtggccataactatccttgatacctgtactagttgcttccggttcagcaaacgcttgactgtgacagtcttacaacagagaggtatattaatacagcaactattattatcatggacttaaggcaaagaaggactactttctagtcaatggaccccacttgaaatgctggctaagcacagttcagcactcaggaattcaggacctgggcatcactgtgatgcagaaactgggcagagtccctacgatggttgatctcgtcattgtgactgtctctggaatcaaccaggagagaagctgtaggacacacctgtgggattgtcttttccaggctgctgaagtgggaaggcccactgtaaatgtgggcaatgccccactccacaagataaaggaagtgcaagatgaaaacttggtgtcccaggcactgctccattgctgtgaagagacaccatgacaaaggcaactcacagaagaaagcacttaattgggggcttgcttacctttttacagggtcagtccatggtcatcacagtaggaaacagacaggcatggtgctgaagcagtagctgagagctttacatcctgatccacaggtgttgcaggggacttaaaacagtcatgggcctttgagccttcagacccacccctagtgacacacaacacacctccttcaatatggatgctcctaatcctccccaaacagttccaatccctgggaagcaagtgtttaaatgcctgagcctatgggaccactccagaccacactttgttcccggccttgctgtttcacacctccatggggtattcactttcctcatcgatgaagccagtgatgccaattgctaaggaaagaagaagacattccttcactgataccaagatctagcttctttggggctctggtgtagcctgaagaccagtggctccccagaaatcctatagtctttcagtgtgagactgctgcctcatccatcctcatgccacacccatcatatgccacaccctcctatgccacacccatcctcatgggctaagaagatgctgagtctcagcctctccaggacacaaagagccttgttggacaaagcagtgctatataagtcaatctaataaacctcccactctataggttctgttcctctagagaaccctaacacaccctgattcccctgaggtgaaggaccattcatgtcccaatggattccaggagctactctctcccttctcttggagccagtcacttttgtgattgaacagaccttcttactcttttgtcccctggtctcaaggtatgtttggagcgtctcaaagatgcttctaacgtagaaacgtgatcttcaagtcattgtcaatacagaaaaaaatatcctccctgtctcttggaaattgaatgctagcattgggaaggttcacactggtgaattcacatgttccggctttcctgaagtgttggtcctgtggaataggatgaaggataagtcactccccacagggcatgaactagagcctctttccaaagccatctctgggtctatttagatgctgctttattcggcccattcagtccccagacctaagggttcccaaggcagcactttgcaatattgtccaaaattgctgctctgtcatgagtccatcagatgcgtgtctcatcgttcccaattttattttaattccatgatgaatgtgctcgttgatttgaattttggctccccagggcctgccagggatttctatttgtggaaacagaaagacttctataatccaagggttagctgaaaaatgccttgagacatgcacaaccttctactctgtgatttttctttgagcactgggactccagcagaaatgaccgagcagttgtgtgcaaaggactgcatagggctcacaggatcctggcaagtaaagcagtgtggtctactgattagtctcacaaaacccaggccccagctccactgcacacctaagcaagctccacccacagtacatgcttgtcaaagccatgactctgggtcttctccccaacaactgacagctggcgtttagttaggaaggggaggagctagcctccggaagtccgactcctgagtcattgaagtaataagataatttctagcacaagtgaactgtcagattttaattaacagtttacatatatctccatttctcaattatggaagagggtacagaaggaatgtgagagctgagaggaggaggagagctacgatatgttgtcttctggacatgacaaactcttgcacctaagaactcacaacagctatggttaccttcatcagacctgtacaagaccaagccagtcaaaattctagaatggtgtgagaggggcttccaaggacccacccctgcctgaggagttattagcagttgatagttgctaaggaagatcagttttccttagggtaggtttcccatgtccctgtggatggtccctcatccatgtacatatgggtataatgaatgggacaatttaaaaagaagtcatgaagtgctggctagctagacacaagctagagtcaacagagaggaaggagccgcaacggagcaaaatgactgaatagtattggcttataggcaagtctctggagcatttcatttattcaagattgatgtgagccgggcgttggtggcacatgactttaatcccagcactcgggaggcagagacaggcagatcgctgtgagtttgaggccagcctggtctccagagtgccaggataggttccaaagctacacagagaaaccctgtctcgaaaaacaaaaaacaaaagacaacaacaacaaaaaaagagattgattggaagggtcctgcccattgggagtagcgatactcctgtggaggtggtcctggggtgcatgaggaaacaacctagcaagccataaggagtaagccagtaaacagcacccctccatggtctctgtttcaattcttgccttcaaatttctgccttgagctcttcattgacttcctcggtgataggctgtgacctgagaatggcaggctgaaataaaccctttcttcttcaaattacttttggtcatgatgttttattatagttataggaacctcagccaacacagatgaagttggcagggagatgcattagaggcgcagagggaggcagaggggcagttgtcttgaatatataatcaagattatgtttacatgtgtaaaagtttttagagtataagaaaatatattatttgggaggatgatttatattttgtgaaattaatttgggtatatttcttttatttgctggtcaattctacattctttttattttttaatttttaaaatttgtttattttatatccagaccacagtttcccctaacctcttctcctcccaatccctctgctctaccaaattctctcctcctccatttttatgcagaaaaggacaggtctcccttggatatcaacaaaacaaggcatatcaagttgcagtaagactaagcacctcccctcgtattaagagtgggcaaggcaacccaatatgaggcagggggaccaaaaagccataatctaaagaagggaaacacacacaccctactactacaactacaaccaaataacagggattaacaatcattggtcattgatatctctcaatgccaatgcactcaattccccaaataaaaagacacagactaacagaatgcttaaaaaacaaggtccatatttgtgctgtatacaagaaacacacctcaaaatcaaagatagacattaactcagagtaaagggttggaaaaagattttccaagcaaatggatccaagaagcaaactgttgtagctattttaatacctcacaaaatagacttcaaaccaaaattaatcaaaatatataaatatattattaaaaataggtcacatagcttgatgaaatgggctactgcgaaagaaaaattgactcggggtgtcatggtaaagccagtgtcagggtatttataaaagttggtatgaaggtagtcttcgatgtgtcaggagggactccagagaagtggctgcacttgggggcttgccagagttgtctgaactcaacacctctctccacatctgtcacacaattgccttatatcctaaggacttgggtgtgatggctgcctatatatttaagtagttcttgtggtctctggaacaacaattaatgttaaataataattaccaggcagcttggggaatccctgtgtttctgtcttctgtcaatctaggaaacagaaaactcgttttatttcaggatattttttatttccatttctttgaaactgttggaaaactctgaattttcatggaaaatagaataatgttctgcatggaagctagtgcccaggtttcctttaaattttactacccctgtgctcttagttgcaaattgagattttctaaaggagttaaattggacagtagaacaaggcagtcaatgctagaactgtactatgaaaagtcagatggctatatggtcatgacagctgtatatatctgtacaaactatctccagatcaaggtgcagaacagctcaattttccagaaagttcccagaacctcaacctagctgattccaactcctcggtagataaacattgcttggtatccaaggatcattaatctgcctattctcaaacttcatggaaatatgatcatatactgtgttttctttcatgtgtctacttttatgcacttctctgcatagtgattctgagatttattcctgtatttatttttactgttacatagtattccattctgtgacttgttacctattttcctgttgatggtggcttggtctggttttgtttttgtttttgttcacagtttttttgttatcatgaagaaagctttctttttataaatataaatattagcacgcaaatctttttctgaatttctgcatgtgaaatgctggctcagagtacttgcgttgttcctcttagtgaaagctgccaacagtgactagagttctcattgattcctatactacccaatatttggtcttcccgtctgtttacagtcttcataggcgtgaagtgacatggtgtcttaaagatatattatcttttcaattagtgcgttggagtttatgcgcaaatgtggcaacaggtactgagggactccagtagagggcatcagatccccggtaacaggaagccatgagcctccaggttctgggaactgaactcaggttctcctactcactgggaataactgagcatcactcagattagagggcttttggtgatttggtttttttctctaatagagctgaggctcaaacctttggctttccacatgttaggcgagggttttaccactgaggtaaaaagccaagcttactgatgtcttactgttgttttcttttcattgcctgatgtatctgagcctatttcatcatgtattttacctattgtcttaaaaattgttttcttcttagcaagcggacttttaatagtttatgttttatacctataaaagccacagttcagatatatgaaatacaagtatcttctttcatcctgtggccagcatttctagcttattaaaagtactgtgtgtgtgtatgtgtgtgtgtgtgtgtgtatgtgtacatggtgtaagcacttgtttgtataggtatatgtaagtgtgttcatgtttatgttgaagccagaggtaatcatcaaatgttttttcaggatctccaccttttgttttgtattaagatctctcactgaatctggtactcattaatttagctaagcagttcggtcagtgagccccagcgacccacctatctctgcctccccagtgctgggattataggctctcactgctatggttaggtttttgtgtgtgtgagagagtatactgggggtctgaactcaggtcctcatgaatcagtatactgaagcactttgctggttgagccatcttccctgccccttcaaagtattgctcataagcacacaatttctcatattttgataaagcttactttatcaattacttgctctgtagatattttttaaatagactctaaaaaatactcatattctagaagcttctagaagcattgtctgcagttgaacacttgacatcggaaaattcaagtcctgcctgatgcattttgtaaaggccaaggtcccaaagacagcacacgaaggggacacagaggcctcggtagctctgaggttctgtgcatcatcgtcccagcatgacaagtgtgaagagttctgaggccctaattgtggtgttgtttttggagatgacttcagattctgcagctttggctttctctaggatcagagccatgctctgtagtgaaggctgccaaaccaaacttttccccgggtttgagagcacgtgtttacccacgtgcagacccgagccccggtgtcctgctggaattgcatctgtaaaatctctttctcaaatattgctttttgcctctgtggaaaaacagcgtcttcagctgaaaggacagtgagcaaaggtctcccctgtgcccccacaccaccgaggggtggcatttaaagatggaagtggctggtgtaacctgattttctttggctttaaaaaaacagtttgtagatctgcatttgtttttaattctcggccctgtgaccttgtgctcctgtttgccttgataaattccatctcgccttccacagccctcgattcaggcctgaacgctccctgacatatttcatcagcctggttttaggtaagtctccagctcccaagactgggaatttttaactgcaaagaagaaaagtacatgtcagtaatattttaccacttccccttctcattttaaatgattttatgggagtttaatgcaattgctactcacaattaagcaatggagtgaatataacataaaacagaccctccgtcaattcccaaactgggggaacaccacgatattttattttcttgcggttgttccattcccaactctaagttaacctacaatagtgacaaaatcagtctctgaccacccattttgtttactgtgcagtaaacaaagtgcacgggagtgtatgacaatgcccacggctcatgatagctaacatagaaaagtcaccgaggacacagaaattgttggacgagctgagaatattgcatcgagtacagggagaacttcatgctatttgcatctgtgagcaaagacacagctctgtagaaataccttttattttattacacttgtgtgtatatgtgtgcatatatacacgcatacaatggctcacatatgtaagtcacggggcagctttcagaagttggttctgtccctgcaccatgtgtatctcagagatcaaattcggcttatcaggtttggtagcaagggtgattactcactgattcatctcagtggaccccataggagcattttaagagtgaaacaaagtggtaatagattatggtagagacatgacagcagatgggctaaatagtaccgatctgtcaactctattactcgggaagctgagacaggaagatggcaaattcattgagctcctgagttatggagtgaattcaagatcagcttgggcatggactgtgggtagtatctctacagtgtctttactggcctctgttgatgtctacagcttggtgtttcttctccttgggaatataacatctctgttggatcagggttctgctcttacctttagttgcctctttaaaggtcaagtcttcaaatatatccatactataggttagacttcatattataatcccatttctgtaaagttagttcacttgcattattcaaatatataatacataaagaaatgtaatgaatatattgagggaaaccacagttgtctaaatgcttcttttcctaagtactcattattcacatctaacagatgtcagcatagacagcatacatgtataaaatcaagattgaatgacagacagatatatagatgatagataaatagtagctagagaacacatggatggatggatggatggatggatggatggatggatgcatggatgcatggatgcatggatgcatggatggattgcagatagatgatcaattgatgacaagaagatagattgatggcagatagacaagtgatatgtgataggtaggtagatagataatagatgatatatagatatgatagatggcaaatggattataagtagataaatacacagcacatagaaaataaaatggtagactatagggaaaaaccctgattaagaggtaccgctgaccacgcccactttggtctggtcagaataatgtaacaagggtttaagaaggagagaggcacgcactcggctctctttcgcctggctgcgatgattaggaagcatttctgggtccgtcctgctcaggtgcaaacctggtcactggctcccttgcataagtacttttccccaataaactaccagttagttatcaacctatctctgactccactttgtaattatctataggtagacagatagatgaatgatagatgatacatagagatgtatagataggtaaatagatggaaatagatggacagatgatagatgacagatagatgataaatacattatagacaaatgacagataattccacaaaatgcatgggtatgctatttttattaaaacattaaattcaatatttcctaaacttaatgaaagaagaaataaaaacaaagaaactctgaagagttaaacagttacttaatggtctctgcacagcagagaaaagatgtgttacaaggttctgaaagaagcctggtgtggtggtacacccatgtaatcccagatgactgagacaggaggatttcgagttccagaggagcatgaactgcatatcaaaactctatatctcaaaccaaccatttcctaatttcctgacagactaactccaatattttaactaagctgaaaaccattaactaatgatgttcatatttaaccatgtgttttaagcttagtagtgtttaatggtgccttgtgaatggctgtaagggagatccgtgcctttagacgcctggcaccctactacatacacatagttagcacctttctccattgctgatgttagaaaactggtacatgaatggaaatggtatttctcacaatcatgtaggttacagatatatatcctataatcaacaggacacatcaatctacctgggatttcttcagtttctgagaggtgacaacataattaacgccatttataactgagtgtcttgtgttcagagaaaaggcacgtgaatttcctggtttttaatctacactttcagcatgtagtaccccggttggaaacaacctcacagactttcaggtgttgggggttgaactgagtgagctctcatgctaggcaaatgctctgccattgctttatacctctggaaatgattgcaagtccgagaaaccttgttttataaaaatttgttttcaaacagttaactgagaaatagtcacacagaaaatgcatgaagtcctaaaggtaactataaatcacattggtggttcattcagtagctccactttaaggcatgaataatagacaagaattccctatagttgttctttctacttaagcacaaatattattaatattttggcacaaatattattaatatttctatcaacagattttacttaagcagacattttcaaggttcctgtgaatttagcaaatatttatgagcttccaactctgaggaatttctttgaatgctttgacctctagtttaattttcataatcataaggtatacggggatcattactatccctatctcatacaaaagataatggaagcttgaggcatttaagtaacgtttccatggttactcagattatggcagggctgactcaaacccaaaccccaactttttccatcatactttgtggtctattgttcttaagaacacactcatgtgcacccacgcgcgtgcatgcgcgcgcgcacacacacacacacacacacacacacacacacacacacacacacctggaagctagacaaagaactctttctgtcccaggacttgagtttctatagaatcacacacactcttcaagccacagcacttatcatgattcattgtgttttccttttatggtcccattttcccaggagacccaggagctcttgaaagtgggttttatgccttattcatctttgtaacgtctctggcacatactgccagtcacatggaggagttttataaaggttggattgcacttaactcttagttgtcactgtttgtgtgtgtgaaagggaaaaagagtctttgagaggggagtttcttcggagactcccccttctgtcctcctactttctgccttcaggtgctagcatgtggaaggaaaaaaaaacctacagtggttttatgttcagtatcataatatccaggaaatagaggcaaacttttcacctcagaatacatgaagtgggagaaatgggcccagggaaaaagacaacattcctggacccctggactatgggaggagaacaaagtggaatggagggtggaggctggagatgagcagagagttcttacatttacacttaccagagtcaaggataggagtggggtttgtgtgtgtgtgtgtgtgtgtgtgtgtgtgtgtgtgtgtgtgtggtgtggtgtctgaatatgtgtggtatggtatgtggtgtgtttatatgggtgtagtatggtatgtagtatggtgtgtatagtgtggtatgtgtgtctatatgtagtgttgtgtgtctgtgtgtggtatatatggtgtgtgtggtgtctctatgtttgtggtgtggtatattatgggggtgtgatgtggtgtgtgtgtacgtgtgtgtgtgtgtgtgtgtgtgtgtgtgtgtgtgtgtatagtatgtgtgtgtgttggcctagggcatgtccacagaatgagacaatggaggaaaaggaggaagaagaaagcctgaggttctatctgtaaagaagaggattcaattagagcaatggcacaccatttggagactttcctggaaatccttgtgatccaggcaccatgagattcagagacacggtgggccaaagaacaggaataatggacatgggatgggaagatggctcgatgggcaaagtgtctgctatgcaaattcaaggacctgagtttgaatctttggaacctacataaagctggacacagtatctctgtgctgcaattccattgttcccatggatctgctagccttgtggatacactacaggggactaaggaaagaccatgcttcaagcaaggagacaaaccaatgacacccagtacacaaggtcatcgtctgacctacagaaatgtgctgtggtttatgcacaaacacacacacacacacacacacacacacagagggagagagagaaagagagagagagagagagagagagagagagagagagagagagagaatgaatgaattgatgggaaacttatttaaggggaaacagactggcatgaggaatttgcatcgcaaagtaaagttcttcctggcagatatgaaggccaggccaaactgggatgtggtgttctttgacacagtcctaaaagtgcaaaagtacaaccacagccaagacagcagccatgagcttaattttagagatgaggatatgctttgaatgaggaagaaaatcaggctggagacacagactttaaggaaggtcaaaagaaaatagcaaaggggcatgttggtacttctctggtgttcactgtgtctttgttagtgtttctattcttctaaagaggcaccaaggccacagcaacacttataaaggaaaacatttaatggggtaggctacagttcagagattcagtccattatcattagggtggtccatggcggcatgcaagcaggcatgatgctggagaggtagttgagagctctacatcttgtgcaggcaacaggaagtgaactgcctcactgaatgtggcttgagcacatgagatctcaaagcccacctccacagtgacacacttcctccaacaaggccacacctcctaatagtgtcactctctttgggggtgattttctttcaaaccaccacacacagttacttcctggtgtagccctgggtttttctcccacaccaaccaaggccaacaggactcagctaggcaagtaatctgcaagaacaaagaagacaagttcagttgtatgaacagctttgagaactaatgtaactgctaccacttccatcctcaaagcatggcaagcagtgtggtacctctaaagattctcttattctacggcatacttttaaattcaagaggatcctattctaagagtaaaggactataaactcatgccacaagaaagccaaagatcccacgcagtgtgcctttttttatcaggcatgaaagccagaatattatggggtacattcatgcaggtgctactgataatgtgtcaatgtatgtgcttatccataaaattatatctcacgtgactagtaacgttttaacagaatggggaagcatagcgttttagggaaacaggagtcattaaagaacacagcacactttgaaaacattgaatcacttagacaaaagaagtatcaaagctgtaaaacaaaaatgatgacttgatttttgtatttgaagcacccaggtccaaggaatccagcaatgatttgacaaaaggcctacagatgaggaagtccctgacttttccagctcatttttgaggatgcttcctttaagataaggtgcagtcctctcgttttcctcccgaagttacaggtaagctgtgtttgtctatgaaggacagtgtccctccaaactgaactgagtggtctctaaggaagattcattaaaatgtgcagaaactagcaaaagtaaaaatgtccatgagttcacactgctgtacataaatgaattaacttaaaagtaggtatggtagtttaaataggtatggcctccaaagactcgtgtgtgaatgcttggcccacagggagtgtcacaccaaaatggtgtggcctttttggagcaggtgaggcctgttaaagcaagtattgtaggggcgggctctgaggtctcagatgctcaagctaggactgatgtagctcagtctcctgctgcgtgtgggtcaagatgcaagactcccagatccttctcaagcaccatggctgcctgaatgccaacatgctccctgccatgatgacaatggagtgaacctctgaactgtaagtgagccaccccaattaaatgttttcttttataagagtttccatggtcgtggtatctcttcacggcaatagaaaccctaatgaagactagatagctctgatctctgggactggattccaaagtacgcatgcagatgtcccaacctcaacaatgagtagtgtataccttaggcataggtgcacagggtgactttctcccagtgagaacagtatagaaaggaaacaaacacttatgttcacttgggggaaaccaagagacaccacctcagccaccacatgatcgaagggctaatagtaaaggtaaattatgacaatagtctgtgtacttgacattattttatagaaatgagtattttgtttcctgtagcatggcccagtcattacagccatagtagctgtgtatgcttgccctgggttcacagaagtcagcccttccagcagacacttacctaaggggaagggactcattggtccctcccgtatcctgctgatctattggcaatcaacagactctgggaatgggaatggaaggcatcaggtactccttgtgggaggaaagacttgtgttggctcttggtttgcaagagcttattataccatggcagagccagttcggtagggttcacagtgactcacgtgtgtctgggattcatcagaacattgactagcatggcgcagaaagctcaggccagacacagggacagattataaacctcaagacccccttcccggcctccagtgacccatttcttcccatgagggcccaagtccaaaataatgttctacagtcactcaaaacacctcactacctggggaccaagtgttcaaataagtgtccctctggggagtatttcatatttaaaccacggcagcaaccattccttctctataatacatgcagttttttgtggtcagtttcccacctcctctccccatttccctgtcttaaagatttgtctctctactgttgtttcctgcacctctttcttgcacacaagtgtttctagaggtgaccagaaagcaaaagatgctgcagcacccttgttgtatctttctttgccatcaatatcccatgagccaggttctaacactgcctgttataaccagatgctagcttaccttcccagccatgtccccattctccccaaatgaagcaccatgtgtcacacaaagctcttgcttatttctgtgctcatgactactgtatcttatttttggtttctttcattttgtccttgttctttcattcattttttgatgccttaatgcttctccctacctggcaagttgccacactatgctttcttcccatacctctgttgatcaggaaactcgatagatgttatcaaccgacagacactttcaaaaggatgtacctagagagttcatgacaagtgagtctgtaattcagatatttatgggctacagttgcattggcagcgtcatatagtcaagatatggttatgtgataatgacagaaaaatatgatttataagccgagaaatccccaaactgttagcaacttccaatattagcttccatcacacagatttagtcttggcaaagtgtacatacaattaagcagctgtctctcctgggtcctcagatagtaacaagataaaaactttggttcctttcctgtattcttcaacagtcctcactaatgctcatgtctcccttgagtctggttggccatctgggtctctgatcacactgctacacatagccattgtattctcatgtcagcagaaggaatgcttgttgtcactgttgtcctgtggtctagttcttgggttctcaccccagtgtctctctggttaccccctcatttgttaaagatcacaaatggtataggtggggaactgaggtctgattactaaacaggtgcttgactatggttctattactgaacttctgcaactataaaatggagatgacatttctatcatagaaggctgttgtgaatacattaaacatgtagagcattttgaaaagcatatggaaaagcaagagtataaaaggaatggatgttcataccatggaattgtcctccaaaagtttcctgaaattgggacacatgtgagaaagatattttaagctgttacattagttatttccctagtaggttatgacaaataactaattataatagttatcatactaggtagctatcatacctagtaggcatgacaaaatacctgacagaagcaacttcagggaggaagggtttactttggctcacagtttagaaggcacagtgcatctagtggagagagcacacagtgaagagacaacagaaaaggtggtgggaattgtgtcatggcctgttcacatctgggtaggtcaggaagtagaaagcacaggaccaggaagaagcagggcaggggacaaactccaaatctgcctctagtggcctaatttgccaaccaggcaccacatctcacaggtactacattcaaagcctccccaaaacagtgccatcaaatggggggcaggcaagtgttcaaacccatgaccctggagggggcttttcttcttcagaccatcacagccatcatttccccagctgatgggatggaatttaaccataggagagctgcaaactggaagcatttcccctctgttttctcacgtgcttcaccttcgtaagtagtttctgttgttgcctttgagaagctcagcctcattgcagtctttgggtactttgtgggaatgtcacagttattttctgacagctttgaaaagtctcttcatgccttactttaaatctgtgttcttccttgtttgagagtctagtcagctttggaaatgtagaattctgagcccttcagtttcagaggttctctttgaactttttcctattgatctttcagatcatgagattgttttattgtttgtttcttggatgaatgtattttactgtcattttctttgggaagccacgtccttagggaagcactagtcattcatccttccagcgcccaaattggttttactcttgtttcatctcactgtctccagatttttatctttatttgatagaggcgcaaagtagttgtcatgtgtgatagcattcttgagatcagtgacatccatcacctcacctctccaatttttctagactaaagccgacctttcaaagtcttgcttattctttttggccctctcgttgtcattgggctaattccttgaattttttatttccctcaaagttttagtcatttataatttcacaagcaaaacacactcctagtttaatagtctatgtttgcccaggctttgaagctcatgccactttccgtattgttcactcctagatgaatcaatttgctaaactggggatgctttataccacagagcaacacatccaccttctaaaacttgattcagaaggcttcacttatggattctatacagttgaagttttagccacatctaggactttctttatacttgacctgaaagccctgggttcaggaaaagctagacaccaaagatgatgttggtggaggacattttggccacttctgaaaaatttcaaaatatagtttgtgacatccatagcatgattttctccaatatcagacttagaatcaccgatggacagttgaggggatcagggcctcaagacaaaactcccagatgccttatttacctctcctatccctagtaattcttctacttccttcaaaggtttctctatgcaaaggtgatgggccctttggccgagctttggggtataaacagtacacactcatatgaaatgcagcacagccagaacttcctgttgtgatgaggctggttgaggagatgggcagcagaggctcaggctcgtctccttccagcatccccctgggatacactggactggaaaggggaaattgctgggacccaagatggagaccagcaggaaggaactcagtgacagcaaacactgaacagtaactgtctctttgtgcagtaatgggtggggtgtagggggggaagggggacagagtggggagttggagtgaccatagggccaaagttgttctctggaaacagaagatgggaaaggagagtaggaggtcaagttccttatggaaatgggaggccgagggatgaaaaatgggtgaagtgggatggggtgcttatcccacgcatggttttctcctctgaataggaagaggctaatagtttaatcaagcataaaaacagagaggaaatgagcctatggggcagacacactcagcccttgatccttcttcttcagtccagagtcatggagcttgtggagcactgagtggggctgatgggcagaattgggaagctcaaaccatggcctccttggaaaatggtcatgtgatggctccagctctgaggagggcgaggtcatgttccccactctgtccatgggaccccgaaaccatccagcaaggtaggctctggaaagggacctagttaatctctgaccctagggcacctgactaaagatcgaattgctgtggaagctggttccagggcaatcttagtgacaagtgatgctgaagtcacaatgaaatctgttgtgccagcgactgaagacggatccaagaagtagaaaaacaggcaggtaaggcacctttttctccagaatgacagctacataagagttgccatccaccaagcctctaaacagcatgtcagagcagaaaagttgtaaccaaaggaaaaggttgtaacttatagccacgtgtctcaaactctactccaacctgaacctgctcatttgccctgtggcaataactttcattggctccaccttatccaagactcagtgtacctacccagtgtacagtaagtgcttcccagtcagagtcagtatatccctttctccacatggtctccagtgacaaacctgctcccctttaagccctgtgcaatgggtgagcagacaatgagcaagcacaatccctggttctccagttaagttcagatttcctgggtcacagtggttgcgtagtcatcgcctccatcactggcatgtcaggacctttagcctactgtgtctgaaagacggccttaagttagaatgactctgccaacagaagagagacctgggccttgagattaccactgatctccacatcctccaccactgggcaacatttaggtggcgataagtcccgggaattgaccatgtggaagccatagcctggcaagtccagggcacttgtttgcacaaagtgagccatctagaaatggccgctcagtaatgtctggcaaggagcttcgtaccctccatatgtgctaggaatacattttttgcataacaggtgcagctccttgaagaacctggggttgggcattgtttgctctcagtgggggctttggcagagtccccattagttccaggcccagtgtgttacccacattagttcagaggacaggagagggtcagggttagtctggagaaatactccattgttctctcttcttccttttcctaaaaacagctcctcttcatgactttactagtcatgctttagtttcaggtgtatatagtcttattttctgtcaagttattccagttttataaactgttatttggtgtactttcttagaagaggtacctcttcaattattttttcttcaattatagagtcaatttctgagttttacttttgtagctccctcgatgttcctctttgttgtatcttctatagtttcattggtcataaacatctctgtgtctggatgcacatgtgtgtacagcataatatatggaaacatatacaacctcacagtttttttatggcttcatttttatacttgtttatttgtttatatgtgtgtaggaacaatggtgggcatgcaaaggtcagaagagaacctgaagagttgattttcttcttcttctgttttgtagattttggagattggacactaacacaaccattggcaccttggtaatcaatccattttgtgaagtaaagacggtgagtgcatctgaaatgaatagggctaaagtaattggaaaggatatggacaaatctttggggtgattttactacttcacactttttaagaagagtgatggttgcagtacattttcctttgtcaataacgcaatactgatgatttgtgtgtttatgaatcacatctcaaattcccaaggtgttctatgaagggagagctccactatgactgacaattgagcgttgttattgttggggagagagagcgtcatcaattgagaggatgctggcattgctaactgtgggtctattcttcggtgcaataccctcccctcccacaccatccaccgtctgcatgagcaagcattgtcagccatgttcagaaagccaaaaaggacagaaatagattgtttactgttccttagtaggcttccatataaactcttatttggagtatggctctatgctcactaccatttctggaccccagagcccagaatgccttcccttgctcaccttgaggagtcagctacgtcatctcctactcaatgtacaggacacaggctgtgtgaagttgaggaaggaatgaagaaatgtgatgttttaattgttttttttttctgaatctgaaccaatgtaaatctctgaaggtatgttaccaccaacattgaatatttcctacctgttttcctgtaggtattcctgcctgaataacatcacacatcagcttggctgtacttttggttttgttgagcacacccttgccttttggttttgttgagtacacccttgccttttgttgtgctgtttggttacataccacttgtccccctgctttctagcttgtaaaatgttcttgctctatctcatttgcttttatcttcttacctaattttttcctgtgggtttctcctaagtcatctttctgttgttttggtgctgtttccatgaaacagaagggctgtacctttccagtttgccctgcctgacaagaaacaccaactctagctttgtcttcctcatttgctctcggttttgtaatcacactttcctcagctttcatgatcacacccaagtggtgatttctgattctcatcttctagcattgaccttctcagactgtaaaatttaagtgtcctctgcctccagcagaacctcacatgaatgacccaagttcatcttgaccgacacagaagtcatgactatacttcctaatttgtggactgaaagaagttctctctcagctgcttattactcctcatctcatttcatcaccgatttctgttaattctgcttctaggatttctaggaaattgacctctttctactcctgttggtctgttttgaatctgggagatcaaaatgcagccctcaagcctctatgctattcaaaatccatccattgtgtagttattactacatcataagagtcacttagcatagactttctgggaacaaaacttcactgttcttctcatcctctactgccttctctcctatagcctctgccatctttccatggtgccttcttgatggagactactctgtcccatttgcctgtagaataactgattacactcttaggggtggggattgaagagacagcctttccatcaacacatgcaacatcttctagcagaaaatattccacttgattaggcaacaaagacttaatttgaaaatacaacaaaatgtagtattttcagtaaaacagggaagatctcaggggattggacactgactagcaaaggattacacatcccatgcagatggtgtttctttataacaagataaatcaagtacctatgtcctagggataaccagtaaccaggactaaccctgtaagaaaatggaatacttatctctgagtgggatgagaggttctgtgagaaaatcaaaacacatttaaaaaacaccatcccacaaaatcagtgtcatgatgactttataattcgttctagctataaactatttaacgttcttcaataaaaaatcggaaaggaccaaagaacatgtgatttttctttgaaaaaagaaagatcctgttttaaacacagtaaaaggtttgtgtgggttcaaaaggggcggcatagacactatttttcttttttttttttttttgctatcattggcttgctttcaacattggtgtccaaaacaaatgaatctggatggaagcagttaagggctgaagcgagctgggccagttcttttaaagatgctgttgctgcgcttccctcccccatttcaaatctgggttgggagatagaagccacttcagctcagtgagtcactttgacatccttgccaggacaattaaacttccagtataaagcatgacccgaagcctgccctccaccaaccatcccatctcaacctccccaccccacagggtcagctcttgacatttaacagctcgcaatttcaactgcttggccaatgaagccaattaaatgcttttgcaaatgatttgctttcttccacatattgagtgatatagaaaaagtggtgttggttcctctgcaggtctgagcaacagtacacatgcctcttgatcgtgatggaggcagtctttgcagcatggggaaagtcaggtcagttctccatccattactcctcttctttcctgccctgactcttgaaggaaagaagaaaggaagaattccagggaacacagccaagaaaaaagatgtatagcctgggcatccccatcatagatggctgcatgaagtcttggggattaagcttcttgaactaccagttactgaagcagttaatacatcttgcaaatttgtggctgcctgattgctaacagctgagaagttttgcctcctactctcaactactattgatgtcttgccatattttgaatataatcccctcaacagcattacctcattttttttactccactcttgtagattagctcatctgggttatgctctttggtgtgttggtgttgactgttgactgtgtcttaatttttcattttaaaggcatctctaactataacaggtgcttaatgaacttggtcttcttcaacatgatatggtccacctgagcctaaggaggggcttccgtttttgcttcctcattgcttggtgtcgacaggctagctggcatgtaaaaagagaaggcgtttcaagactctttccttctcaatctttgtgacactccccctcttacagggatattttccagcatgactgggatggaggttccatctttatatactctaatgtgatgagattctcagctactttattaaagaacacttttatatttggtgtgtgtgtgtgtgtgtgtgtgtgtgtgtgtgtgtgtgtacttaaaattacagtctatacttcccaggacacagaattcaatattaaagacaaccaaactcaatttaaataagataacccaaagtataatggaactttactatcctctgttccaagtcctgatgtaccaggcagtttcactgcaaatctaattaactctacttccccccaccccactcatccaaattatagccctcagataaacatatgcacaaaaggttctaagcactctgtccctgaggtttttctctcttcagtaagtgaaacaaacaaagcacaatttctgtctcttgtctcctccctccatacatctctctactgccacctctggctcttctaactccatctttatctctatccctccgcttatccctgtccctgtccttagccctattcccaccccaatccctacctctactgcctctatttttacctcagtcctccccttacctacatctaccccctacccatctcttcttgttattgtcactatccgtgtctttgtcactgcttatccaaaatgactcacatgacatggaccccattcttcatggttgagcactgtacaagggattgaacaaaagtgatggaggagctcagcccttcctattgcttagcatgggggggggaatacaagcctaaagagacacatttcaggtccatagagcgagcgtgggaataagcaggaatgtgtggacgccggcaggagagaccggttacctcctttgtgaattgagttagatttcaaagagtgggagaggcctcctgcacacgagtaggcgtttgcaagacagaaatgaggtggtggcatgagagcagaagaacacgatgtgcaaggctgtccgtcctgagttaagtgtggggtgtgcttagggaatggcgaatgagccagtgcggctggactttgggttgtgtgggaagaaatggcagaaacccaggatacagagatggaaaagacccattatctcatagtccctctctccatctcttccttctctgtctcacagccagtgtgtccttgatgttctcatccatggctggcccagggaagttgatttaatctctttgaactcaaaggaaggaggtcaggaatggaggcaggctagaagccaggtcacaacctttcttctcaatggccaaatgctttggctttacatgtgaatgtctctgtctttataaatctgagttactcaacatttaggtaatgttctatttttaatcggtttactcagattagtatttgagacattcttcatctttaaatccagttccttagatccaataaaggatagactatcatttgatgcaccttcatgaaatcacaactgacagttgtttgagattcatgtctggcctcgagacaagtgacaaagtaacatatcaaaatgcttttacttcctcatagcatccaaacaaaactgtaatatatctccttgtgggaaagggccatttcattccttcttgcacttaccactggcatggctgcatgttttttaattacaaagctatttctcagcagtgttggaagtaaagtcacatgatggtaacttggtgtgatatggagtagccttgatatgtaacaaaacatcaaagctgtgcttcagtagacaacatgagtttagttcacacgattgttctaccaagagtaccagaaaccccaaagagccacatcattgcatttttccatttgtagctattatgttaaccattaaacaagcacttactgtggtttctgagagaccaaaaagagaaagagccaagttgcccttgagaattaagttagaatacgagaccagaattgaaaggtctaacaaagagttattatagcatctagcaatcaatgtggagacaaaaattcaaaccaaaacaaaacaaatacaatccaaatggggtatttttttaacttaacaaggttggttgaaatagcaagacaactaaatgaagttctgcacacatgatatgaaacaaaagtccttttatgatgctggccacatatagcaacagatagaatctcacagaattttaaacccaaagaagtctacaagttttaatttgaaatactattatttaattaaatatctttatttaaccttagttaatggcttaaaagattaattgacaatattttagcaaagagatagtacagaggattttgaatgtttccaacagaaaacagtgagtcatcatttaaaacgatgggtgccatgccactgtgtcctgagctggccattcatcacacattgtatatatgtattaaaacgttacactgtgccctacaaataaacataataattatgtgccaattacatgacaactattaaacattaaactgcctagagaagtataaataatttatagttttaaaatgttgatattctaaaatcttataaattcttgcattaattttatcttttgtatcatgctatgtcactgcctgtatttaacatactgtgacagacaaagtacaattcaaatcatcattctgatgtaagttgtactctattctgccttgttttagacatatctacacatatttttcctttagagattttatgtaatattgccacagtgacagtagttacctgtataagatctatacaagatcaagacaaaattcctccatggataggggaggggattcccaaggctccacccatagccaaggagttattggcaatttaaagctgtgaacagcaggctagttagtctcctttggggatgtgaccactggtaggctccagtagctgataccacacccttgggcatatgggcagcactaactattctcagggtgctataaataaaataaaaatgaggacatgaagttgggaaggatattgggagatactagaacctagagggaggtaatgttgggtgggaatgaacaaaatatatgagattttcaatataataaaaacagcattaaaaacaaagaagcaaagaatagcatgcatatgcttatttccttcttagcacatcacaaggattatgagggttagtctctctgtgtgtaatagattgcaatttatggagaagtccttccgtgtcaggtgtttattcagttgcatacatacaatgtgagccttccaacagctctgggagataacccaccttaattccattttgcagaagaggacaatgagtagagattaaggaaccagtgggcagtaaatcccagatctgacatgtgtgctaaagttgactcgcaccaagcttttcatcacagctgtggattacccagctggcacatgaagtcagcactgtaatccttggtggacatacaacatggtcctgacttaaaaatagaatggttagttattaaatgagttatcaaaagtagaaagcagtgtagtgagaaacaaagaaactctcaagccaatgttcttttaatagagcaatttcctatgcatgattatttctgtgcagaggtaaagttgaatttttcaaatctacctaatcaaagccactctgggtttgatttgagcacaacttccttttctttgtatcatttttttctgtaaggagattagtaatagctgcagcctactaataactctgcatgacttcattgtaaccctagggtcactttgctcaaaaaactgagttggtattgtcagctttgagatcaagatcttagatgctaaagagtcagacgagctcttcaaaaggacttgcggatgctagattttctaattcatgcttcagagctttaggataataacaatcctgttcacaatacttttaaagtagattagacaccactccgccccacccccgccagaatgagagtatttgaacatatctgagtgcttccttgattcagagccatggaagtgttgttacaatagaacgagatggttaggagtgggcttttctcatgctttgaaagacctagaactctgttcctttgaaattgaagacccctctttctctgtgcttcttccctggtgagttagttgcacacattctgtcctgttgtgactgacagatgaatagctcccttcccacctcctaaagctctgcttacccccttttcctgctcgtgcactgaaatcaggaggagtcaacaggcaggcatgctgggtgtcaggctagaggcagcacaccttcagtccatctgtgaaacagaggctatgagctccaatgttcagaagtgcaaacaccgactcagctgccccacggcacacatgccctcatttgtgagcagctaggatgatggccagagagtgcacgaggttcccttgtgtgtcaatggccaagtgcagccagtgttcaaccaaagacactagtttcccggccttcatcctcctgcttgcccatgcagatgtccatggagtcccttcctttccagtgtgggacatgcatgccgaccaccacctcggctttatccaacagttctttttgtgggaagataggctgatattcaaaacttaagagttctttgatgactagattaccaacaaaactgctccgatgagaagcaaagtttaaagatgtcttggattgtgtgtacaatagacaccataagaaatgctgaactccaggaatgagttaaaaaggagattgatggaaggaatgtgcaggaagagactatagagaagggggccaggctgtttaagacatggattaaaagcagataacttcccagtaagcaaaggacttagagtcaaactgaggaggaagaatgcaggggaattgggcctggaggaccacatgctatcccttcatgctttgctgcagctagctcctctagtatatagtcactctgtttctgtcattatttggcacaagatgttgacacactgggggacaaatgagaatggccagatttccacactatcagtcccttagtttcccataatgcatcactaatttatcagaagcatttgttaaattacactgtagcactattataagtgaataagatggtattgtctttttaacaaaaactagtagtacaccttatgaccactacatacacatgcaagtgcatgcacacacacacacacacacacacacacacacacacacacacacacaggaaatagttttagaaagcatgagcacccaacttcacatcccagaagccacataaaaaagcctggcttggttacaatcacctgttaccccaatgctatagtgtgatgaatacaggagatgataccctggggtttgctggctgccagcacagctccaggttcagtgtgagagcctttctcaagggagtaaaatggaaagtgatagagcaggacaactgagatcattttccagcctctgtaagtgtgtacagacgtgtgtgtgtgtgtgtgtgtgtgtgtgtgtgtgcgcacatgtgcatgtgcgtgcatgtacacacacacacacacacacacacacacacacaccactcacataccaaagcacacacagaaatttaaaaaagaaaaactttagattattgttttaagcaaattatctggacttattgcctttcaaactgtcatatgggtaataagatttctctaaaaccactcaacaattcttcctgcctctctccctccctccctccttctttttttcccctcttcctgtctttcctttgtgcagaggcttgaactcaggggtttgctcataccaggttctcactctactgttcacttaccctggagacaccaaccactgattgtaacgagccgtccatgaagaaatggcctggcatcatttacatgatacctgttgcatttattttacagtgattaagttgatataattcaacttatttaaatgctcaaaccaagttcattagttaaatcaaacattctgggttaattttaagaaaaagaaaaaaatagtaatttgagatgtataaagaacaaatcaagatgctttgggacaccctggctctcccatgaaagagtcacttcttcagatctctgggaaactcattctcacctgctgtggctgtgttgtacacagtagaccacaggtagaagcccgtttggtcaagaatttcatgattgatctcacctttatttttcctaagggaggcgggacaaatatgtgttctaaagaaacacaagactcaacaagttgagattgggatttattcctggtattacttggatttccaagaatttttggaagtcttgcctttcggccacaatgctccttggctttatgagttatttgccaaattcatttcaagctcttaaatttacagttaaaagagaaataaaaaagtctttcatttgttcctaagctgtttattttgcttgtaaagccaatcatagcgtctacccaataaaaagagaaatgaatgaagagttataactctagaaaagttaactatggaagtctgaaacacccctaggcagagccagacgtcattttaacgagacagcagtttctctttgaacttgggagggtctgagcaataggcttgctgagagaaatgcttctttgtccttttctagaattttctccttcaagacagaatgccgctaagcttgaggctgaacttgctggcattgccggcacagcacaagcaggcaaaaagctgctcatggctctccatggctctgcagcacagggacagccgctcaagctgcaggttggtgtgaacggggcatggtgtgagttccacagcacatccttgcatagggctgtgacttgcatgtgttttcttgcccttgcccttatgtcttagctacatctatcatcactcacaaagctgaagtatttattttggttaaggttttgaggggatgtggggtataatccatcatgggggtgggtgaagagatgcaggtagtctgaggccagtaccgttaatcctgtcacagcctggccaggctacaaagctcaagtgcccaccccctaccagctctccctaccagcttccaccttctaaatgttctagggccttccagaatgcatcataagctggggtccaagtattcaaacacatgcacctatgggggatatttcacacccaagtatagcacccccttctatttgcccctcactgccacataaataccaccttccccccttctctctctctctctctctctctctctctctctctctctctctcacacacacacacacacacacacacatgtctttacatctatgagtttagacctaaaattccaaatatattaaaatggacatccattcccatccctgacccaatactggaaggaaggcttgacattgaaatcctacaaaattcaggaaaataaataacaagatctaaaaagcataccatccaatttgtaacaaacctaccaagaccagaagtgaccatatgactctgttctactagaaatttgggcacatatcaagggctttgtttctctgggtttaaaaacttttcatcactttttccttctagaatgaaaatacaaccctaactactttaccagagaactaaaagtgtttgaaaactaattccccccatgcctagtgtctgcaattgagatcagcgtcacttccaatttgtttctgactcccagaatatatatatttttttaactcattgggaattttgcccatgggaacactaatagctgtggcacaaatacacaaacaaacataaataactttgtgtgtggaagcaatatttaagtggcttgctttctcactagatcccagtccatggggtaacaacaaactccaatggatgatggctcagtagtcagttctccaagagaaagcaaatactgtggtttcataaaacaaagcacatttagtgcactctcctctttaacttttcctcccttaattcttcttgcatggggaatcactgtatttttaaccacttctctgtagttatttttattatctacgcgcacttgccttagcttgctcatacaagaaccaaagtatcaactttcaaacaaaacaaaacacaaaaactcaaaataaaatgaagccaaactggggatgccatcagggtccaatcttgaatgcagaagggagccccgggccccttttctctaaggggtagaaagtgtgattctcatgatatggcagactggctggaattgaaatacattcttggaataatcaagaaacttttttaacatagcagaaatgtttagtatcaaaatttaatgtagctcttactcacaaatgtccctaagagaatgcctaaacttctgttggtcatagtttcctcaggttaaaaaatagacgcaatgcatttcacatccatgagcttgttagaagcagaggttgagtttgtagaatgtcatgcatgacagtcacacagtccagcaggttgaagctatgcttggacaatggtatttttcgcaggataagcctgaaatgctgatagatacttttgtgcctttgttccaggcaatgggatagagcctgctggaagtgagttccacatgaatggatttggtgacactttttcatgtttggacttcatccgtcagttctagctccaccaagtaacatggctgctttgttcatggatgagcacttggaaagctgatgagggcgttttatatatttgcttcatgtcatccttcaattttttgagaaaagttctcattatgtagcccatactattctcaaacatgtagatctcctgtctcagccttctaagtgctgggattatatgggtataccatcatgcctagtttatgaaatttttaaaatgagttccatttaatgaaccaatgtcatatgacataaaacagtcctgaaatgtggtgatacgttatttatgatttaataaagattgcctgaagtatcagaaagcaaagcccgccacattcgttagctgtagaagctatgcagtagtggcacacgcctttagttccaggactcaggcagacaaatctctgtgagttcaaagccaccctggcctacacaaaagagaagagtaacagaacattgacattactggcctcctctatggattctgagaccaacatgaaacatcacatgttatctgggtctaagcctgccagctggcccacacttaatagtaaccagaatatcataagctgagtcctacaaatgaatgttctctctctctctctctctctctctctctctctctctctctgatacacacacacacacacacacacacacacacacacacacacacacacacacgccaattagattctcaggaaagaaaaggaaccattaggaaatgcccctgagaactctgattgacacgtatttccggtttcttcagttctagtaagttggcaaactattgctcattcgctatagctacacatataaattttaaatccatttttataaaattaagacaaagaaggtgaatttatcatagtacaagaacacttccagagattaactacattgagaaattgatgaggtaataattttccttctagtgcattctttaataactaataaaatagatattcacccagactaagtaaggtttcacaatatccataaaatgtgatttatctgataacttgtaacaagaaataatacaataataattattttaataggatagggctttgggaaatagggaatagaggtcacatatgattccattttacaaatgctaggtgatcaaaagttcatagattgcaaggaaaagtgttaagagctctgggtaggtacactaaattgatttgcaatgctattgtctttatgttggcttggtgacttgcacagttagggaaagctatcatatcattttcaaagattaaaaaagtcatgtagtctacataggaaataggacgctcattctgtcctcagaatcccaggcttggtggacctgatgtggtttgtgttaatatctaccttcatctctttcctcttttagctcatcacaaagccatgtgtagatcaaacagcattgtctttctctctataagctgaatgatggaggaagccattggcagcttgtgggcagtcagcagtcatccaaggaagacagagttcaaacactttggtgtgttgtcttagaattccagttttcttcccctaatatagtataacatttaaagtcctttctctccaccctcctcatggtcataaataaaagaccgtaatcagatcagaacagccgctcagctactggagggaatttcttggcattagccacaccctggttcctgagagacatgatgattcaggccgcagtcaccctcttctcagggaaggaagggtgtatggcaatggctcgagtgtcattctttgaagactgagggagagtaagattgcatttggaggcagacgagcaggaaacaggggggttgtcaatccccacagatgcttatgtactgtatgtttggctagggtgataaaacaacagactacgtgtcaagtgacctaagcagtatttgctcttctcccaagagcatctccactgctgccttaggacgtgttctgacaacctcactgtaacctaatcccatctttttagacccagggttcgaactcatttattgttcaatctttaacctgtgcctagagtggggcgatttttcatgcctgtatggcttgtcaatactttgagtgtgctttcaaaggctggacaccaggctaagtgtgtggagctgatgggatctttaagagatacagtctagtggaatacaattgggcccttagaatactatatttaaaaagtattagtgcatttcttgtaggacctagttggttcttatacaagcaagtgattgtaaaactacttaactaatgctaattaccaattcagctcttagtttgcttgccatcttcctggttttaggacccaaagccatatcttctagaaccattcccatcataggctaggaggtatagttgttcttccttgtaggagttggaaaacagtggaaagagatagtcattgtgaaaggaaataagctacttcagctagaaaataaaggattgccttgagaactagaacccacaggactgggaagctaatgagttttaagtttggcagcaagcatgactctagactccaacccaatatcagctcttgtcggtgcattttttttttcagttgccgtaaagcagagtgggtatgcatggcggaggtagtgatggtgatgagaaactgtgattttgtatcctaagtatttctgagacattgccactgaaataccccaagggaagtgaaaatatagttcggagtgacaagaatacacccaggatagacatgtaattttatgaattgttgggttgtgggtattcactgaataatttgcacaagattattctgaaataaaatgcataatcagtagtgaatgagtaaaactttgtaggaagttgctaggtttagggacatccaaaagtaaaatatcctaccaaggatatgaaaaaaattcagctggaaatgctgaggagattacaaagagaagttgtagatttgaaatcctctatgattgttacttatgtctctttaaaagttttagttgctttccaacaatacggagtaatacaaacaaaaaggacaaaaacagaaaataagaaagagggtggccaaaatataacttggctggtagagttcttggcaagcattcatgaagccctgagcttcaccccagaactgcattagccaaccacagtggcagatgcctgtaatctcagtccccagaaggtaggggcaggaggatcagaaagtttcaaagtttataaaatcacatttaattccacctggggttacaagagactctgttgcaaatagagaaaggaactgtggatacagctccatgggtgctgtgtttgccgtgccaggaccacagtaaagcagagtgtagtagtataagtctctcattcaagggttcccttgatgaaacaggaggcagatatggggcattccctaacactctactgccagttagtctggtggaggcaagcgtaaaacaagagattctgtctaaaacaaggtagaagacagggaccgacacttaggattctttctgaacccccaaagcatgcaatgctcatgtgcccatctgctctcacacatgaacagacacatacatgtacacatatgcacaaatgggctaaatacataaacgaatgaatgcataaatagaaaggatgagaagggaaaggaaaggatgaaatagcattattcagagcctgtgatcatatactgagaaggtcacttggaaaaaccaacgattttattaagcactaagaagttcatgaacttgctgaatacagaatctgtctcaaggtcaataaggtaaagttacataaacgacaagtgcttggaacgttatggggaaaataatctacaatagcaacgatgagttggaaatgagtgctcacatgctggcccctcctttgaaagccttccagggctgacccatcacattcccacagcgagcccatagacatccacctgagcacatggaggcaacaagtttacacaattcattgacattttcccagctagtgaggtgcaggctgcaattcatatccagggaaacttcattcatggtccgtggcctttgttcccatgagatgtgatttctttaagaaacaaaagttgtaaggaattacacatgaaagtacttaataaaaaaaatcaaaatctattaagaaggaagtgtgaaagcactagcagtgggggaggaaactttacaaaaatagaaaagcagatcatgttcttagacaggaaaagttaacatcataaaagataaattccctccaaattcatctatatgtaaaactggattccaatgaaaacaagaaatgggtgtttccacaaaactactttccagcttcatatggaaaatttaaagaggaaaatagagacgagtctggaggactagctgttcaaatatttaaaatgctcaacaagcaaaatgaaacagtcagggcatgagcagacggacaaatgaatggaacagaatgcaaagtctagacagagatggaagttcttggggactactatgtgatatgtgtggcattatatcatatatcatatatcacatatcacatatcatatatcacatatcatatatcacatatctgtggagcaataatgattcaacatgcgatagagactggggaagccatctggaccaacagattcctatcacatcattcaagcataatgcaagaaggctgatgagttcattgcaagaaaatgatattaagaagaaaggaaaaataatcatgtaatctcagcatatgaaagctctttatccatatgacataaatacaaccgccatggaaatcgtgtcaagaaacacagcttcaaaataattaagatgtatcattcctgggaaactaccataaagaaaatcagaaaataaacaataaatttggaaaataaaatacatataaaggtgctacttcattttttaaacaactactgaaaaagaaaaaaaaggatacataaatgatacaaacagagaatacaaaacaagaaacacagattgtttttaaatagatgacagctctcacttttaactacaatacatgaagtggacattaaaccaccccaagttctcatccaccaaaggagccagggcaaggatgaggtaagagaatatcctcatatatcactgagtacctgccaatttagactaaaaatcattaacttgcctgtcttaaaaaaggaatggaggtcattgattcattttttctgccaagaaatatgatattcaaactataagttgaaataaccataaaatagctcaagaggccaaataaagaaacattaacctgaagataagaaccatgtgactcttaaagcttcctccttcagagaacatttaagggaccaggccagttcaattttaattttgacaagcttctcaaatgaagacagaaataaaatcaaaagatagcccagcataatgtgcaaaagacccaaagtctatagactaaagaccttaaagtgacggctaaataaacacccccacaggggaccatttgggcattttgaatacttctggccttgattttagatgattccaactgtaagagaaacagcatgctggtgtgtaccatagtgatcatcctggcttcctgtagatctcaataatcaatttgataaattattaccacacacaaaacattgagcacacagcaaagacagccagacatgtaaaggaatgatagtcaccacgtgggaagtactctcttataaaaacagactgtaaagactctgcttctaaaatgcccaaatgttttcaaagaactgaatttatctgcaaggaactgaaaccataaaaatgacaaaacagatctaaagaaacaatagaatttccagaaattaaactattgtgtggctcaaacttaaaaccaagtagatagggttaacagaagagtaaacagcaggagagagaattagtaaaccggaaatgaggaatgatgaacatttccaggaaaaacataataccaatatggaactccaaaaggaccctaacaagtgttctacagttactaagacagcatggtactatcataagaacaggacattaaggccactggagcagaataaaaaagccacaagtcgggactggagatatggctcagtcaataaactctctctcatgcaagtacatgaagacctgagtcagacccttggaacccacataaagatctttgtggtctcatcgtggatagagacaggagggcccctccagggtactcatggagaacaagtcaatttggtagaagtgtaacagtgaacagtgggccccggagattaagaggagtaaacaggacaaggtggaagtcagtaaagccaagccctgggagctacaggtgcttctgggtaattcccagagtccaaaggctgaaaaccttgattttcagtgcctacgggcaggagaggaatgtgttcaagttttaaaacacagaaatgaaatcttttctttgccttaagggtctacccagatcctaaactgattagatggcaactgcctactttgagggtgggtctctcctactcagggaccatctcttctggaaaacaaaaacagatccagtaaaaggacttcataagctattcagctatcccttattccagtcaagctgaccgtcaacatgataaagaaaagttcatatacactgctgaggtgtggataaatgtccctgcaagactcagtgtgttaaagacatggtcattagcatatggtactattggaaagctctgaaatctctgagatagttcctactctgagaaaattaagtcactgtcaatatccttgaaagaggtattgtgaccgaagccacttttttttgtaagaatttcaagcggttcatcatatcacatcctcagttgagaccaagagaaataaatgaatgcatacatgctctcttgctcacacctgcccagctctacttcagtcttacatagtccaggagctcctgcctagggaatggtcctgcctacactgggctgggtcttcccacatcaatgaactttataacacacccctccccacagatatacccacaggtcaactcagtgtagacaatccctcattgaaaccctcttcccaggtgattctacaggtgtctgggtgaggctgaccattatacaggcctaaagtatttcaactttatcatgtcttgaaagaaaataattcaacataaaactccagtaccttaaattttgacctttgtccaggttagtgatatgaacactggcactgacccatgatgctaggtggtagcactcactccatcacaaaagtaaacagtcagtacagtaaaatgagtcacccaaagtttaaggttcacatttttaattattaccccatttcatgtacaaaatgcctatcttgtaatcttgatttcactgaccagggatgcaatgattccagtgatgacataaaattattgctcagcttgaagagtgcaagccagtagtaacctggagtaagaaatactacaatcaataatcttgagtgtcttgaagaataagaattgtgtcagggatgcagtgacaatgcaagcatgggttagagccaatcttatgaggaagaaaagagcaggcatgtcatgacatgacaaaattgggtagttagagcatcagatagaagcatatactcctgccaactaatgatcaagaaaggagtaagtcacacacacacacacacacacacacacacacacacacacacacacacacatctccagtaagtcacagagggttttgtgcttcaaaagatatcattttgaggatgtcagtatcagcagcaaggcagaagatgctggagttcggaaagaacggccttagacaatcacagatgactgatgtatgtcagaacaagcatttagcattgaggaggcaagcttgctccggtggtgttggccagagcagatagccattcattgggagtctaaacaggacagtccacagcatgcagtgctgctttgggatggaaatgccaccaagccactctgagcaccctgagcattcaggaatgtgagcaagcaaacattttcctgtttaccgtcaccaagggaaggatgcctggatggtatcagaatgtttgcagactgactttcatgttgctttattcaatgccacagacaaaacaatgacctcttcagtaatctttcaatctaaacagtgccccaaggtatcccgaacaattggcaccatgcatcccaataaaaagatgtgtattttccctgaacaagatagcaggtgtccaaccaaaggcccaagcacaatggttgttttcaaataggattatttagctatgtgccatggcacttgccccggactctggtatttgggaggttgacaaccttaacggggagattcaggagcttgaggccagtctgggttatgtagcaagatgctgtctcaaaaaaacaaagaaacaaacaaactaaaatccctcaaaccatgcctttttataccaagtgtttacataggtcaatgacactgcatacccgagcgcagcactttgaagattctgggatgattttaacatactctccaccatggaaagggggagggggttcacacaacaatgaataaatctctttcgaaggctctcactagatctttatgcagataaaacagcaagtcacaagatctcagtgcttgggaaacagctaacatggggcttggtgaggatgaagaccatgaccaaactggatctacaaagaatggtgggttctggggtggagggagctataccctgggaccaaggaggtgaacaccaaagaaactggtggagctgttccctgctttcagaagtagtgtctgggcattagaaaaaaaaaaaaaaaaaaaaaaaaaaaaaaaaaaaaaaaaaaaaaacatgtcaattgtgggaaacacatagaagctgacagcagatatgaggtattcttgctggtaacagagataggaaaagaaaacaagaaatacactacatagtgacagattgatttatgcctggaagcactatgtctgctacaccatgaagtggcagagtcccagtgccctctcccagctatttttgggtctcactaggaagaacctgagggctttctcctcacagcatatttatcaacctgaaattaaatttagttcagtgctctggatgctctcagctgtgggtattcatgacgagtatcaattccatttgcactttagtagagtatccaagaattgcaggggactttccacgcttgattataaaccaggctttgtgttctgtgctttgcctaactgtaaaccgatttaagtcttctatgcgtgttgggctaagctgtgatgtgtagcaagtacatttaatgcattttttaaaacttaaagtgtttttaaattttggtggatttattgggatgcaactccaccataaataaaggattgccttacacttatgacatcgaagcatgaaaaaactgatttatcaaatgataccataagaaagtgcaatgccaagctatggaaaagcacttaaaatgcaactgacagaagggtcgtagctgggacatgtaaagcagtggactatgtgaaagaagaaagagcacatgcatgcctaggagacacagggaaagggatgaatgagtcagatcggctgaaataataagagggaacagcggggcacattattcctaggtcctatggaaaggcaggcttatatgttcaggatagcatgcaagaaaataaaagcacacactaataccccatttagacaattccatcgagcaaaagaagataccgccagacatgcagtgcacagaccctttaatactatccaggggtaaatgcctcctacctatactgctaagatataagaagtggttggagcccagataacgattctctatagatgacttgtgactcagaagcggaaagtgctgtgaggtggggttaaactgctcctgggagctaacaatatttcatttatttacctggatgtcagcatattatcaataactcattaaattgtacagttatttgttaatatctattcatatctcataacaaaaatatgtttcaaaaggaatgatttgcaaggagagtgtgtgtactgattgttggtgatcatcaccaaaggcaacttctcagttattggtagagatcgttcatgaatgttcattgatttgtttatttagaatttgtgtgctctgaggacatatactcaaagaaactgtttaaaaaatacattaatataatggggaggtggttgagtggttaagagtgcttgcttatcttccagaggactggaattcagctcccagccacaaatatctgtaactccacctccaagagatctgatgacctcttctggctttcactggcatctacacagacatgccatacacccacaaagacatacacataaatatacataaaatcaaatctttaaaaatatactaggaagaaaaaagggagactgaagtaggaaaggtgtaaattgttccaacaagtgtttgaacagaagtcttcaaacagtgactagcagatgacataaggtttaggagtttatgttttatagatgacatttgagtgtttgtaggtggttgaatgagttggtagagggaagagaatagaggatagccaatggcagagcttagctttaaaagaaatgagaacagggtaaggatagagctcaagcaggaataagtggtccttcctttttctgacacttgagagaagaaatcagaggaagggacttcagtaagaagaggagaaaaatggcttgagaggcatggaaacaacggatttcaagagttagctcatgattttccaatagaaaaaatatcacgtaattgaagaaaagacataaggacttaaagagatgcataaattacaaacataacaatgagagaattggactaggagaatggctgagtggcatggacaggacaccctgagaatcagaagctgtcaaggctcttcttctgagttaagctcttttctttcgagatttagagacagggaaagaagcagagggtaagtgtgttgactctgcagataaaatccagtagaatttagttagaaaagtttcttacttaagaactgtcttagggtttctatcactgtgaagagacaccacaaccacagcaactcttataaaagaaaacatttcattggggctggtttacagttcagaggttcaggccattatcatcaaggcaggcaccacaacacggtggcatacaggcagacatggtgctagagaggcagctgtgaattctacatctggatctgtacacagcaggaagagacagtgagccactaggcatggtttgagcttctgaaacttcaaagcccaccccctagtgacaaacttcctccaaggccacacatactccaacaagtcacacctcctaatagtgccactccctgtggatctacaggggccatttttattcaaactaccatgggaacctatgcactgaagtcataaagacatatatgaatagtcaataaatccaggcatagatgaaatgtcaccagcaagagcttttaaggcagagagacacaggcaataaaggctaaatgagagagcagtggtgaacctaagagacgaatcttccgggagatctaccggaggcaaatatgtagacatatctggagtcatgttcccatgatggcctacatcccaaagaactcacatgtagagttttgaaaacaagactattgttaattagcttttaatgtctatgccaaagaaagagataactacaaatacttttctctgaaatcagaatgcaatgtgcaatattccttcaaggtctgtttgtcttcattggtttctttgagagaatgttcaaacaagcttgcatttcctgagcacagaagacagcacatgtgttttgtactgctggggggggggaggggggggggtgagccaggatgaaaagggaaaagtatttctgaatcattttcatgttgtcgtggctaaacacaaacagcttaccatctgggctttccttgctttaattccaaattgtcatattttcacacattcttgggtttgggtagttggactgagatttctttttctaatgtgcattgtggccacttaaaaattgttaagaatttcccaccaagtggtgaccttagattgtcccacgaagtctgactgtttgaatgggagatgtgctgagaagagagagaaaagtgaagatgaaagaaaaataacaatttctgatgataaaagcaacatcaacaccaaactaggttgctatgaaagttccctaaaaggtctctattttttgaagcagacacatcattggagctaatgaccaacattcagatgaccatttactggacacctttaaatggatctaaaagttctcactcactttatttgtttctctcttctgtactttgtttttttttctcctaagcgtttgccattttttgacctaccatataccttgcttattttatcctgcttattttccatctgtaattggtgttaaactcaatttgttttgggaactcaaaaatgttgtttataatactgttcaaatgaatgtgttccaactcctgaacccaaggtcaggaatcaccgtggaagaggaccgggaaagacagtgagagtcacacgaggatcagggagttcgctgtgcgactgtgtctcctaggaatgtcagaagctacacctatgaaatctcaacaacatggctgcctaaacaggagctgaatgaggacagcaacagtagtggtgttgatgtgggtgtagggtgaggacgacagcccaggtctcaaccttagatgaagaactacaggcagctgaggaatgccgagagccagagagagtcttccccaggaaagatcacacccattggttatccaataccaagtggtcacttacatacaaatgacaatatatggaccaagcaggctgtatttatatacttaggaacacgcacatatatacacacaataattaaagacaaaagactgtgaattaaaaaaaaaagttggggagggctatatggaaggttttggctagagaaaagggaaggagaataatgtaattatattataatctcaaaaaatgcttttacaaagtgcgttaaatatacaagtacttcaataatatttgttatcaaatggactctaaatgcatatgcatgctaagggctggggatgtagctcagtgataaagcacttgcttaccatgtgtgaggtcaggctctgcctccagcactgaaaaagaaaaagaaaacctctgtgctaaagagaaaacatttacatataaaatatttctatagtgccatagagacaatcatttttcctattcattttatcttaactacatcttatagttctactttgagtagaatattagattcagatttaagttacaatagtttctatcagtaaaataacatcaaatgtaggaagactgattcaaggcatttgttagccttgaggaaatttagctcagctttcatccctgagataaggggcttgttcagttccttcagcagtaaaattaggctggaaattcagctctcacccatgacctacttaccaacagactaggaaggcattctttcattatatgggtaacttcaaggatagcttcacagaataaatttctaaacaatatttttctcattttgttacagcaagttttcattataacttattagatatccacctatagataaatgatagttttgaaaagccaatttaaatgtgattaactgtcaaatcagatgtgtcacaaatttaaaaacaaataagtcttgaattttcttttcctttcttttttttttttttggttttttgagacagggtttccctgtggttttggaggctgtcctggaactagctcttgtagaccaggctggtctcgaactcacagagatctgtctgcctctgcctcccgagtgctgggattaaaggcatgcaccaccactgctggcttctggaattttctttttaaagaaacatttaggtggtttgttgatcagtttgatcatatattgagtagaggtatacttaggatttaggctgcaataaatgaatcagtttgatagtgcttattaatttaaaaaacatagaagtagaatttaattgttttggattactctagagagtttagagaccaataagtagattgaaattgaatagaatttggcctgtgtatcttatgaggaataatgtgttaacaatttgagcgaaaccactctgcaaaagatggaataaaagctcccaactgtgactgtccaggagacaatgaggaggttctgctcctccctgtgtgcagaaaacactttcttttctcaccccctcacccatcaaaagatctgtttacatttcagaatgaaggactttctgtttctggagtaaaggggaataatgggcccacttcccaaggatacctacacaaacatggagtcttagtattccagatccactctccccatcaggaactgttcctgcagaggcaggaaattgaggctaggataaaccatgagcaaacagttctctctgatgtaatcacctggtatctatcagaatttttccaagggtggaaaggagggaaagaaagattggaaatgtgtgtattaggaattttttttattcctccatttgatggaacatttcaccaggaagtggcaaaaacaccttcactttagatacacagatgtgtacatgtactaacatatttccagagaaatctctgtaattttaggtgatgtttccagtcaaaagtcaacagataagccaaacaaaacttagtctatgagaggaaaagctcaaaatccagtggtagaagagttttaaagcatcttttagagcatgttgacttatttctcataaagataaatcatcacttacctctaataaaaaaggaaaaaaaaactattccagataaggcaagtaatttgaggtacattatttaacacaaataacaaaaagttttctctccttgataaaacaaattattccatgaagaaaatctcttaagctgtttaacacaggaaaagaatcgtttggcctaagatttcctcaagaccagttcaaattatacccaattttcatttcaatggcagaaatcaccaagtattaaccccaggattctagatgtatcaaatttgccacttcaacagtatttggggccttcacaattatgataatcaacatttcaaagcaactatgggcatttaaactgggacatggtgtagtcagttgggcatgaagtgaccatgggaattcccaaagcatcgatgatgcagatccagtttctgtagttaagacatttaaaagtgatttactgccagccaccaccctcatccttatggagattcacctaaaaaaatctctctcactggcagaaactcatgtcagtcacattatacacttaagagaaataccaccaagacctaaatatcatgttcctaagctaatgacatgcatatctaagaattcactgtaaccaatatctgtgtccacatcggccccagatcaaacagtggcccgacatcaatccctttggtggcttgcccacagccattgcagagctcatttctatatcctctgtcacataatctcacaccagcagtagatgctctgactgcagctgctgcctatgcatttggggatttcagccagacggctcaatgtcagattgaatatttactccagcactaacagaaacattgtgttacgtgaacggcatgtttcagttctatagattttttttttaatattgttatgcagtggcacagaggagaactatagaggctgacttctataaggaggatggcacacaagggtcaccacatgctgaatatcaagttcttttatttgtctattatgccatgagcatattcaaagcaagccgactgacattactttattagattttcatgtaacagaggttgggcttattctgagtgaccccagcaggcagaaccaaatcagctaatggaatccccaggaagtgacttttttaaaaaaaaataatctttttattacatttatttatttagggatgaacaggcatgccacagtgtgcacgtgcaggggacaaggaggtaggacttagttctcttttatcatgttgggtctcaggagtcaaacccaagttaccaggcctggcagcaaagtacctttaccagagagccatcatgcttgacctggcaattacttttcaaccaaaaaggaaggagacccctatttattcgatcttggtgagcatccataatgtgttttgtacagatggaaacatgtagcatagcagtgaagatatgtttagtagccaatgtatagtcagataagatgaccattgaattgtcccaaattctgggaccctgtggacacctcctcggcctcctctggattaagaaaaagcagtagatcactgctcttcagattattaaagggggcctcttcccactcagattgcactctatagtgttgctggccttctgcccgaggatgctgaagaacagttcagccatgggctgcagctgctgcgtggctaatggcagaggggccgggaatgcacgttctccctggttctgctcagcgccagccagcacacttgcctgatttgaacaaaaatccagcgaagctgcccacttggccccgtgcttgcacagcatcagggggcctcagcagatttccaagggagacaagaggctgttttcaaactgtgtgggcaccacatagaagtgacacccccacctctctgagctgtgcaataatccaatagcagtcctgcccaaggagtccatgtcatcatgttctctctatgtaaggcatacagagttctcccacacaatttctcagaatgtgttctatggaaacgctgtgaactgcaaaatgagagcatggtttaagatcaaagaaattagagaaatactgcatacttgtgcctttctagaaggttctcacaaagcacatgattgtgttagtttatggcatagaaacttcagtaactcagcttggaactataaagttttccttcccctcacagggagctcattaacatgcataaaacacacactggaaaataatgttattttagtagaaaaccctcattttcataggggaagaaatttaggttcagagagataaagtaactttgttctgggctgagcatgctagataataaggagtgaaccttgtgtttctttgcttctgccctgattttgtgttgttgtatttgaaggatggtcaggactgtgtgcttatcctttacatatcactttatcatctaaggtcaggttgatcatctctagattgacccattctagccacaggacagagcctggcagatgccttggaataagtgcttgcctctgctataagtacatgggctagaggttttgaggttaggttgtataaaaccaaaaatgtaccagacagagaaaagatatttccacagatctggagacagcctaaccagaaagttatctttcagacatatttcatggtggattcctaatacacacacttcctctttttcttatacaactcctaaggaacctagttaaatgtgatccatctatcccagacaacactcaaatctactcactccaattaaaaaacaagcaagccaaggtcacatcttgtcagcattccagcagtgggatgactgttctacattcggcaactcaagagcccttctccagatggttcagttatacctccatctggtatgaactttagaagcatggatctcatgctagttggacttcataccacttccgtttctaatgcagcccaatgaacaagagtgaagggaagggattagaacagtagtgaaagcacccattgaagcattagaaagtgggtataccagacagggacatttctacatggagagactaacctctggacaattctccaacaccttggttggtttgtattaattcccatggccacctcctaggaagcatttctctaagtcttcgggtctctcaggcactgtatgacccttctgggggcacacgaatttagttctccaattctcttagtgtctcttttggcagcttagtaacatgagaggctgagaaacagagtcaacttctatttttcagttctgaaaatgcttttcacatgactacccacattgtgctcacaacgaggcctcccagtgctactggtgaagacacactgtgctaattagcaacaccagccattttatagtctaatcaggactgaactacaaactcaaacagttccacagtctcctcatttgtgtttaagtcatcagtcctggagcttaaatgaaacacaataggctggactggggcagctagacattttcctcatgaattaatttgttctggatgagagttcttcaataaaacttcctgtaatggtaaaaaaatcctttattttgtgttattcaatatggttggcactaggcacacctggctactgagcatgagacatggctaatgccaatgaggaactggattttagtttaatttaatttaaatttatgaagccacatgtggctaatgactaccatatcagacagcacagatccagtgagtctaagccaaggctaattctcatcatggctgtacatggtagcacttagagagaagtggcctatggggcaagacaagaggacttgaaagcagagatctctggctgacctctaggtgtgtctccattcccattttaaaccacagttttttatcttcaccatcataatctagggctattggcaaacatttgatgaattttggagctcagaatgaattgatgatattctgattgtaggtagtttcaagatttccttccaaacttagttgcttctgaatccatttttaggtgaagttgtcttgaataagaacttaccgctctttaaagcaggctcaggtagctaaagaaatactaaaccattgttgacacagtttgctatcaaattctcaatcttctacccctgaagagcacagcatctgattcatagagaggaatcaaggaattatcccaattacatgcaattattccaaattataacaagtttctgttatcccagaattagaaaatgagtgctgcttccagccatagtgagcaaatacgttttttccccctaagtgtttttgtttttttgtctttccagcatttgtcagtttgagtactagtcttttggttgtgacaatcaaagtaagaaatccattgaagaaaaacatctggacgacacaggtggacagacaggtggacagacaggtggacaggcagactgtgaacacagaagtcaacagtgtcggaacccagagctgcattgtcaatgttcagtctgagcaggcaagaggcatgccatcttctgaattcacctacagaggtgtagcttttctttctttttttcctctacttaaatctacagcaagatttctagattcttgcttatttcctttgtcatacagactgcctatagtttactttctcctttccatactccaagtaagacatcaaaatgtagcgttgctccaatctggagcttaggaagagaacagactgtgctccaccgatgtgcccttcccggaacctccctctgtgccatgccctgtttaactttctgctgggcttccctcattaaattacttctaacttcacttccaaagaaagagaactttcttcctgcctacatttgtgctccatcttctttactctttgttttccatttgtttctcatttcaattagtaattccttcacagaagcccagaaggactgaaatagcgagcatgtcaacagcagcccaacacactgaacagttggaacaactggaaaatgaagggaagaagcaggcaacacaaagtgtgaacagggctgtctctttgctactaagaactgtctgacaaaaaaatgggagcagatgtgtcaagaacacttaaaaatcccatccagtattaggacagactgcaacaattagaacacaaatgccattcttggggcaatgtttgtatccagaagccatgagtggagatcacggttggactggagaaaggactggacacgttggcctagcatcagaaaacatgcaaagtggagatatgcattcgccgtcttcccacttatatacatgtatacctgcctgggaacatagatacacacacacattgtaccacatgcatgtgcacacaatacggcaaagcacagtggtagtgtgagcacaagaaggactcaaaagtctaatctttaaaatgtgctcccgtcagctgtccttttgactaggaaggcagctcacaaaacaaaaatattttaaatagaatatgactcaggtaaagcatgcctagagaatattctatcatcaaatacacatattgatgaacacccaaactacaaactcatccagaagggaccctagcaccttctcaatgatgactaactagagtcagtgcttcactgatttctgccacattggttagttttgtgtggctttgggcgtgggctaaaatggaatcatgcagggtggacacttttgtgctggaatcttttattattttacttcttttatactgctgcaaacattttaggaaaccactgttattcatcaaagacaaacataaatttgtccaaggcacatcctaaacctaaatgttcatgcatgtccactaacaggcaaaattgggaatgtttataatcacatcctccatcacagccctaaattggaaacattaaaatgtagatcattgtagaattgacaaactgtgtatatacacagttcattgagaatgacatattattccacacaacaataagggtgactctcatagtcataaagtaattttgtagtttacagtatatctggaaaagaagctggggattttaatctgtctccagtttttgaaagtgttctcccatgtttgagtacccaacattaatttttagattaaatttaattataggaaattttaattttgcttccactctacagataagatttgtcattcagaaatagtcaggctcatcagaatatgcataatgtgataacagcatgtttaatgggtaaaagaatatttagaatgcaccccccatacaaagtctaagatgatttgaaacttggcacattacatatgatcaataattcagtacccaatcccatgtgcagagaaagccttctgaggaatcatgcctttgttcttgtggcacattccttggtagagctgtgatcctcctacttgactctgttcatgctaccctcagagcacacccactacttggagagtccagccagctctacttgtgtggcatgggagaaaccaacattcttcagtaggatgggttacacaactgaacatttcagtgataactctggcttaatctaagttgaccagtagccaaaaatcaaactgaccaaactttagatgaatcttggccttatttgaacttacctaataacagcttcgggttttaaattatctgtcatagaagaaaattaaaatgttctacactaatcagcaataagacatcataaatacttgcctgcaaagatttctgtttttatttactaacaagaaaccaaatcttcctaaataaatttgatgtaaacttatcttttgatatctgtaagatattctaggaagtcaaaaggaataattttgaataaacattgtatatagttatgggggccctcacaaaagaagtgtctacttcactagagaaacagaatacaaaccataatacatctggaaaaggagatgaagaagaaaacatgggtggtcattttcccaacctatactctctaataaatcagaagttgcttcaacataaaaataacatatcatttctcacatcttgtgagctgctagaatcatttcatgggagagtgaacaaatgccgaagtgatctccaatcaaaaccaccaaccaacagcacctgtttgcaaaacatttatttgctccttggtgtgctgtgagcttcttgttggcgtcatacccactatctggagtcactcttagatggtcacagttctcagctgccatttcagaacatctctccatcttttctttcattgttttaatctaacttcacttttatacttcagactttggtgaatttttttaaaaaaatattctgggagagatcatttttttcattccttgggttacaccttaaaagtcaatacaaatgagaaacctggacaaaatcaaagaagtcatttaatctctgagttgtgtgtccacaaaaaataacccttacttacgtggaaaaaaaaagcatgcaatatattgctttaaaaacagaactcttccctaaacctctgtttagtggccccattttttaaagtagtgacagtggagaggaagtaggaaaaggggtaaacacagattgtcccgaaagtggtagctagatccacagtcaaactatatagactcattgaggactaaaagtaaccccggctctacagtggagagatgactgattctcacaaagtcaaagcggtcccgcacaggacacctgtctcctcttgatactttccactgcctgaacgccatccatagtgttcaaagagatgctcaagtcctggtggcattagagtttcctcctgtcctcctcacactactggagaacacatgtgagagtatgcacctgtacttttgatcattttctttccacccctggggaggaattgaatggctctgtctgctgaagccatgaagacagcagttcttaaatatgggaatgcattgatttttaggaaactgcccatgtgaaaatggcccttgaatgtgcatttgtgtgaacgaatctatgtgagaccagacacacatgaagacgggtcaacaggagacttcagataccagcaactaccggatcttctcctacacagacattgtcccttccattttggacacatctggaaaatgtttctcacaactaatttctgtttttatcattaaatatgagaatatacctgaaaaaccacagcaaaaactattcttcctgtgtggtctgaaatattccttactttttcctatagcagtaaggaaatgctatatttagcctttgtggccggaagtaattaataaatgtgcagtcagacagtcttaagaagcctcattctattagccaatgaataatccccatatttaaagtctgtatgtttaggagattttaattagtaatgtggtctttgaagattaaggaatagatgttagctaatgttctctatttgttgttaataaaattataatgagaatttccttattggcaaaaattagatacttcctctgaggaaaaaaaatagttcccactttgctgcttgacaatgctcactctcacacaaactctgatctggtgggatctacatttaaccaaaaaagttattgtgacaactctatgtgttgattaatatgaatggaatattcactaattgtctgtctatggtgctctcttgactttgcttttaaggattctcttcacaagtctcacattttatgttcatatactagatgctactagcagttccaaatttctactaaaaaaatgtttctggatgatggcaaatgttcctgtggtagaaagatcacttgaaaccactgcctcagacatttcttaagctacaaggcatcttactagctactgatgtctcatcaacccaaggatcagcacatggttttgttttcctgttcctgaattgcttcacatgacccccatcaaatgaggggtattttgcttacctgtaaaatacagcaacattgcagaaaggaagtaataatgccttataattcaatgctaggaactggagcaagagtgttcactggaggctgcaatagtgcccgtgactatcatcatcatcatcatcatcatcatctcatgaaggtgtctaaaattctggtttctatttgcttgacagtcaagttcacattcaagttcaggggctgggaattctccctcacaaaaaaactgggttgttcacagagagtctactgcctctgcctggacccaaattatatgtctccattggatgctagcatagtatttggaggcccaagggcagttaatatctcctgatgatgtgcaaatactgatattctatgaattgatatgtatttctctttttaaaacatatacagctatttacatgtgaaaattaggagaaaggcaaacatgaatttcccctttcattttccaaaatctgaacttccaatattaatttagacatgatctacttttgtattttttggtaagtatcaagaaagaaaatcagttttcaagtgttccttgcatgccacataattaaatcccctccaggcaaccaatagcagaaaatattctttgtgttctgtttgtgacagggagaatggggggatgatgcgttcacttttctgaaggaaagaaggcttctgggaaaaacgcaagcaagtgtttaagtaattatgagcacacacataaaattaagcattcttagaaatgaattatggtgtttcttttccactgggtagagtaaataaggaacagattattttattttacttacttttactggggacattttataaatcacaaagtggtgaacttcaccacatgagtcaagctggatgctggccatcactcctctccgtcaaagcgccagtctgcctttgacttcagagaacggaatggcccacgagaacatctggggctcaaagttttggaaagagacagttacggtccctccagaaaaatctcttctcttggtgggaacagcacagtgcttgaacttgagaaagctagagccattggcaagagctttaacatgggcaaaggtcaatgttgaactcaaagaaatccaccagaaccttaatgagattactcagtgggacccagcagaccagagtttgtaatgggagactttctccatctatctaggccacactggactggtttctctccacccaccaggtccataagcagctgcttatgaaataaccactcagagacttaatatatatttataatcgtttggccattggcttagttttcttactggctagctctctcttaattattaacccattactattaatctatgtataaccacatggccttggcttactggtgatgcctgggtcttttgactctctgcggctacgtggcttctgctctttgtctttcttttccctacctctttatttgcaatcccctcctcgataaaatgttcctgtccattggccaacacagctttactcatcagccaataagagaaacacatagtcacaaacacatcaagagtttgcttggtgtctcttgtctactttctttctgttgggtttcttacagaaaatgtgtatctggtatttggtgggtcctcatgttttaaagcaggaatgaaagaagcaaggtcgttagagaaaagcaacactcaaggacttgttcagagggtcatgccccacatgtaaaagcccagactatgccagctagcaggtgaagaggcatgtctgagtcatatcagcggaagtgatctcatagacacagacctggctcccggctgatctaccagacaggacctctgtgtcttaactctggggtttagatccttatcctcccaattatgaaactctgtttattagagaggaaggagaaaaagggcaaaggggatggagggatgtccatctgtcttcaacagggatattctgtgcagactcactctagatgccttaagataaagagataaattattcattaggcataattagctgagtggttttaattataagtcattagggaggtactgccttgcattttctcagaaatgggagcatttttggacatcatgaaatgtttcccctgactcgttaattttccaaatatatgtgatgagtataatttggatgaagccatgagacttgagacacataaaattgaattactttaccagcatttatcatctacatgtgcaaaacctatttaccttaaatcaagaaagcagcacaagccaaattaacaataacccaccttttcaatttcaccttatgtatttaatttttgttcatttccagtcaatcttgattagggagcacaatttctgttactttatatttaatgagaatagaatattttatttccagtgaagcagcagagtcattaatgtagatgagtttacaatctggttgactaaatttatctacatttgtttctcttagttggcttatgggaatcattaagggctgggtgagactacaagtctgttagtattgacggatattatctgggtacatcaggtgtcagcacaagagaaaatattggcttatctctcattttttcatatagagcagtggaatatgtgtgaagtttaaaagggaggccctttaaattatgctttggtaatttctgattcttcagtaatgtttgaatcaacaacagtaaattcaatttagatgaattttgccatattccattacatcccatttccttagaagccggcaatcacatacttttcacacaatcatttttacattttttgagaatttcatacatgagtctggtgtttatgtcattcccactcttctctctcccctccagcatctccccgtctctggtgtttgggctgactcatggagtctgtagaacctatcaggagggaggttcctctctgaagaaaacccatttcccctccctctgcagccattggctggtctcctttcagagggagccttgtggattatcccccagtattggtgtggccattaaataccagagaaccaggacaacggcaacatgatagtgtcttctagacgtgcccaagatccttcgtacatgagatcgcaacaatccagttccctacacagacctttgagatgacctcacataacactgttcatccagtgatctgtttgagttatacaggcaggaaccatgcgatgcgatgacaaattttctacagcctccttcccctctcttagaccttgtactcaatgaagaaaaagactcttccttctgactgtcattagctacttaggtgacattcaaggaattcaaactaccagtctgcaaccaggaatctcaggacaaggagattactaaaattctgacctgtcaaagtggttacaatacagcttaatatcaactagaatgcttatggtatttgcactgttgtctcctggaaacattaagagtggtgtatgtgctatggccttctactttggacactccaaaccatactgaaaacatcccagtgtggtgaaggagaagagaagccgagttttgagggtttcccctctgtgatcattgttctcctgccctttccagacacactaaattggaaaatgaaagagttaacttcattcatttccatggtctctagtaaaaccactggtatctaacccacttgctttcttattgtaagtctctaatgagatacagggtacaaagttctcattccccaaaccaagccaagctgaaacaggagtttccaggtcagttggctcatgcttctgatgtactccaaggcactgtgctagggtgaatggggactggggaaaacaaagggctgtggcatcaatagtactggtcaggtggcctcaggtttccaaggcagccatttggaggactgtcccaccactttcacttgtcccacacatgtgtggaagaattttgaaatcatctgaatgcattctcctatgtgaggagcttttaaggcatggggacagatagtaaatagtccgttattgacaaaatgtttttaagaagatgttttatttttattttatgtgttcctgtattttgcctccactgtgtgtatgcctgaaacctacagagaaggggatgttgaatccttggaaactggagtcacagaactggagtcacagaaggttgtgagcggttatatgggtgctgggaatcaaacccagatcccctggaagaccagcctgtgttcttaaccaatgagtcattgttctggctcaggggaagtaaagatggtgacaccctagcattaagtctgacatcatagcactaagttacaagactgcttgcaggttttgcttcccccctccatgataagagtctcagggatcttactaacaaactgagataaccaggttttggggcaacatctttatccatggagccatctcactgccttacacataaattttgtctccttcctggtgaagtaatcaatgagcccttgtcccaagagaagtcttcccagacagtgactgggatttgaagcactcttccattcagaaagtttccagaatttataacaagatagcatgagcccgcacttctgtttacaattttgtaaaagggttggaagaggaagtgggtctgaaaaagttcttatttgactttgtaagttaatggaaaataccagatttgcattctgttgtgtttcttcacacacaaagtttacaccagacaaacaaagcagggcctggagtaccccagcagcaggagacatgtcatgggagctggctgtgctgggccagaagggcttttctctttgaaggtgataccacacatggcataaacaaactgacggtttgagaaaaaacaccccagttttaatcccatttggagctaagtttagatcacattttatcttgtaacagaattccgtgttttgaagatgtttgtggctttaaacattagtgtttttgaatagaacagaggagttccaaactgcccagagagcaggtacgatcaattcctccataccagccctgaggcccaaattaaagactaccaggaagggaacgtggagggcatcactttcctatttcctttttttattgcatttaaaccaagaagttactggattcctgggagccatctatttccatctgctatcaaagcaaatcgtccttcttatccccactgacacatattttaaaaggatttatttattttattttatgtgtgtgaatgctttgcctgcatgtttatatgtgcatcacacatgtgcctgctactctcaaagttcctagagctggggttacagatggtcgtgaaaagccatctgggggctgggaaggaaactctggtcctcagtgagagcagcaagtgctgttaactgttcagccacctctccagaccattcccccaccagcatattttaaaaagagggtctagactggaacaaatgtatcacagagggctggctctcaagcttccatgcacatctgaatggtttgtgaagcttgtccaataaagataccaatggaggagtgtgagggacggcgcaaccattaggagcacctcttgctcttgaaaaggactagggttcagttcccagtacccacctcaggtggctcacagccacctgtaacaccagctctaggggtactctctcgtggtttctacagacacctacactaatgcttacacgccataccccccaacataaacacaattaaaaaataaagaaaaataatttcaagaaatgtatttagtagagattctatgtgtaggaggcattagtacacacctgataactgcacacaatcacaggcacatatgtacagtttcaatgcatgctaacatggtgtaacagtcaaataatgaacggcatattatcatctgtcaattgttacttagggtttatcattcctttcaactgggaatgttcaagatcctttctactagtaattttgaaatgctcaattaattgtcatcagccagagctgccccccacccccactgagaacacacatgtttgacaggctctgaggatgctactccccttcagaccatgctctgagagctaagcatccaggccacaggctttgtagcagcccctggagtgtaatgtggaaacagaagattctgaagccaaatctcagctttgtgagagggtgatgccattcatttgtgaacactgtctagtctggttgatggcagctacaatcacctacagccaacaataacaggctcttaccatcattctttggggtacaatcacttctgtaggtcatagtgttctcttatttccatagtaacattgaattcctgcataacaatttgataataagatggcccaattatgaggaatctttagcagatggaagaatttccaacccaaaggttaagaatagtacgtaaaggtcacagagaaaatcaatatgcttttgtttttcttctgaacacttgtatagctacattatcctgcaactcattttttggtatcaaatgtatatgaaatcaagaagaatataaatatgaacttcccttattcttaaaaaagaaggaaaggaagaaagaaaattaggtcttgtttgcaaaataggaccagggggaaactatttgcatttcaaaagaaatttccattgtaaattcagtaagtatatgtataggattgtctacatactttagtggaacaggttgtgactatgcccttgtatgtttttgctgatgctgtttgcaaaaactgaagttgtgctctaagaattgacaacagcttaacatgggagttaagagaagtgggtttgaatctctgcccaataggaggaagtcagacaatggaaaattctaatggacttgagcagggcaaatcatgtgcttctatacatgtatccatgtgttcacatgatcgtatatatgagaaataataaccttgtccctgtgtttatggcttggttacagctatcattaaataagatgacaagaaagaaactattcaaaaataagtttgatggaaacagccaaactcgtgccaggttcaatgacatttgttcacatcaaagagaatggtcactgtcagacacttcagctgtgtaacagaggctagaaggtttgaagagttccagaaggtcccacaagtgaggacaacatttctaattttttttcatattaatcctcttgtgacaacacaggtcataaacagcctgtgcacccatgtgagttggtgatagggagggtgtagaagccagaggggcaactcttctgagttaggacttgtcaccaactttacaacttccatgtgtctctattgtgaatgaggagagggaactgaggaatggagaggatgatgagaaaggaaaatgggggagggaggaggaggaggaggaggaggaggaggaggaggaagaaggaggagggaggaggaggaggaggaggaggaggaggaggaggaggagggggtagaagggatgctactacccaaatgcttgcaaaggagtagaaatcagaggagtaacaagatacgataagtcacacagccaaacacagataaataaataaataaatagataaataaataagcacaattttaatacaaccaaacaggttgagattctaaagataaataagcacaattgaaatcaatgaaataataagcattcaggatgcatcattagaaaacaaaacaatcaggggatttcatgctccagttttcaaacttctaaactaggcattcaaaataagaattctcaatgtttcacctaagaaatgaattaatacaaacacaatccaattgagtacctttaaatttaattggggtttggtattatttcttaaatattgataagagcacttcacctgagatctcccttctccaaaagtcttatatgctcaatagaacatttttaacttcaagaataatgctgcaaagaaaaagccacagaagcagacgtggaagcatctgaaaacacagacactttcagaatggaacaagatgggtttggtttctgttttgcactgtggctcgaacccagggtcctgctgggccagcactccactactgagctacacttgtagtgatacacaaattaatgaaagatgattaccaactgttctatccactaactgtaacaaaaagaaagtagcttcccccacacggggcatatggccctccatgtcttcttctgcattgacttctgcagatgggaataaacacttgtccacccatttccagaagcaataccactgcaagccaaaccagccctttacaaactgtaaggtggcttatttgttgccttggcttttccaagataaccatcttattttcataactattccagatattaaatctactgattttttccccttggctataaaaacaaaaatgggagctagagatctcattggctagagtatttactttctttgggaatttcaatcttcaagtttgttttaataagacttaaagtttgaacagcctgaaagcatagcttacctaggactccatgcatgttctttctggcacagagaacaaggtggggatttttatggtccagggctaatctaaatgtgaggcttacgtacagagttttaagaaatgcagtaccctgcctcaaattctagcaccttaaaagtctaattaactacacactaatacactattggatgcagatgtatttatcataagaagcctccatcctaaaagcaaatgttacagggagaatcacagcccacttacttggcatatgttgtagtgtagttacatcatggttataggcatggaaatcaggattcactggactcaatatagaatgaagtggagcttatttgggggagaagaacttacgcaggaaacaagtggctgtcatatcgctccagctccaagaatgcagaccctgccatcctgatgctctctgccacctgaaagggcttctgagccccaatcctgttccctttaactggtcacatccgcaccgctacaggtgcgggggagggggtggggtgaatatatcactgcacatgtccttctcacaccagctatttgaaaacatgattcaccgagggcaagagcttcagaaataagggggtacatgtcatcacaatcatcccagaaaacagtggaatgctgggtgcaaaggtctggctgcagagaagtcctgaagttagaaggtgtgaccataagtctaaaatgaaagctgtgttaggggtcagaagcagtaaagccagatgtagataaaatactagggttgacatgagatatgtagatagtaagtttatgttctctctttcagtgtgtgtgtgtgtgtgtgtgtgtgtgttggaaagaaggtggtcaactcagatgctaagagtaagaaatatccatgacattgagggatgtggagcagtcgtgtattagacaagagagacaggagagctggaccccaggcagagtacctgggaattaccagaaaacccatggataagatcctttgatgaagccaattctctagagaatctccttccggtgcttgtgaggtaggagcaatgcccccagcttggctgtcctagaatgcatagggaggatacatggctatgaagtcagagaaataaagcttcacttttatctctctgggtttctatatttccttctgtttgagggcaaattgaccccttagctcatggttgccctgaagaggcagactgggcagaatcagcacacaccacaatgcccaaaacaggaagactcctaagcagaagggaagtgtgcaactcttcacaaccaacagaagatcctccacccatgaggagaataattgttggccttcaaaagggcaggaaagaaaggcatgacgtgtacctacatccttcacataaatcaatggacccgaagaactgctaaaatcgcatctctcgtgggcattgaatatagtgacattgccttcctgtgtggtacagggtgctatccttggagatgcagcactgacagcatggttgcagaaatcataagaccagggacgcaccatatctgagaagagagaggaataaaccctgtagttctgttgctatctagattgatggcttatttgggataaaaaataaaaatgatcaagtgagtttcttaatgattctgttagcacaggaggatcagatgggagtcatttattttcaccaaagcattgccattttcttctaaagtctgtttgggacactttttgcaaaatagtcttaacagtgatcaggtaagaattggcatgtcttattatagtctaacactgaccaggtaagaattggcatgcattattgtagagaaaatatacataaacccttatgtcttgtctgtttaaaataagttaaactgctatttggaaacagttttaatttcaaaaggttcagtacttaaatgaagcctttgctattacatcataagctattgcagagaagaaacaccacattggttaattatagtaatttgggcaattgtttttcatgaatggatttctgtatacagcaacttttgtgcgtgtgcagtgtgtgcaggaaaaaaatccaagaagacgaaacctctatgattctttgaattgttttatgtgaggagcatgacgcaaatagtaactcaccctagacacagagataactgtgtcttaacaaaggacatgggcagggatgaatgcaggtacctctacaggaagctctactcagtgtctctgacccagagctgggtgcctaagccaaccctgatgacctgagttaaacctgatcaaggctcaaggcaaggaagaaaccatgccaggggctggagtccattggcagcactcacttggctgctcacagctatctgtggcatcagttccagatcgcctaatgctctcctctgaactccatgggtaccacacatacacatgatgcctagatacagatgcagggaaacacccatatgtaactattaatggaaataattaaaaagaaaatgtgtaaggatgtgccatacttgaaatatttggggaaacatttacatttctaacagagatgatagcgtgaagaaaagtaagagtctaattgctgctcacttctttagctgttaagcaaaacgagtgagttttggtttgaatttatactggaataagaacggagtttttaggtatatggttaggttgatgtacttggtgtcagtgtgcatgcgtgtgcatacatgcatacattccacgcacaggtatggtggtaatagtagaacttaagggggtcagttctctctgtctgtgacacggtcccaagaatagaactcaggtcatcagacttggtgacaggttcctgtacccgctgagttatctcaccagctagaaccttaattaatatctttggtaaggaaaatggcaagtctctgttggcagcaagcaatgtcaatagtggttattatctccaaggattaatggatagatgcagaggaagctatggttttgaattttcctcttctttgttatacaaagcccaaaggaaaacactgctcaaaactccccaactgtgcagagattctgcatgactctcagaaaaccggagaattttcctagagtcaaactctgctctactcaaatgtaatcattcccttctttcctcccataacgaagtggtacgtagaaagtcatgacttgactgttgttttacttttaaaatatggtactaatgagcgaaaggccacatatttaatctctgggtgggctacttaactctgttatgctacatgaccacacactttatcttaaccagggacttggatctagcaaaatatcaatttggttcaaatttatttcagaaaatattccagtgctctcgttttattctgggtcagtggttttcaaaagtataggtttggtttctgttcagaacttctcactgggctataaacaactgaaaaatgttagcattacttctttgtaaacgatgagtagttcagctcaaggttcatttaaccagaaatctattccaactttgaacataagttgagtttatagttggctatgactcaactctcaggttccaaacccaccccagacatctcagggatgtaagctctataaccttcccaatagcaccaccaaccaaggaccaagtaagtgttcaaacccatgagactatgaggggcatttctcattcagaccacctcactgtgagactaccatggaacacaaacagaacactaggaagcaaaggcttgctacaggaagtatgtcattgagatgggatttgagggtttataacttggcctcacttcttatttcctctctgcttcctttgtgtagatgaaatgtgatcaacctaatctctacccctgctccagccaccatgccttctctgccatgtcttcaccatggacatggttgctttttcttggcatattttgtcacagccatgggggttaggggctaacataaatattataagtcttggacaaaagttaatggctagatactaagagataggcaaaggcatcccagaacagaaaacagcatggatagaaagtaggacagaaagaggtgtggctttcaagaaatagcaattgagtgacttttcctatgggtctcccatccttaacagaaaatcagaactactggagaggcacaaagacactactcattatggtgatcagattttaaatcaagtaaggagggaagcagagaccctcttggccctttaagagagaaaattagatgatttatattgagtgatgaccttgcaaatgagtgtagagctcaggtacggggatttgttcagaaatcagaagaaccagttatggttataaacaaaacactcttgtgatgtttagatggtctcatattttccaactcaaagaggaaaacatttccttacatatttttcaacattgaaaacatctcaccatttccccatactcttataataaccctttcctgacgattggtgaagaaaaggaccaaaggactgcctgtgtgacattgtcaacctatagtgatatcctcttcttagtagagcatgtgaggcctgtaaacaggtgtggctttaaagcatttggattctatacagctcaaagctccagtgagaagtggtcacccatgtgccacagaaacaaagggaacctccctccttgccatagacagtgggatttcttttcctccgtggggagattttatgagaacctggacatctagggagatgctttaaagctgctgccatcaatgatgctttctttcccatcggccctggggagataactttcattgtccaggtgaataaagtcagggtcagagagaataagtggcttacccaggtcccacagacctgagttagacacacaatgactgttcaagatcagctgactccaagtcccaggcactttattttttctcagctccaaacttggcaggagtagctgttcatgttttagtcgctggttccattctgcccgtttcactctgttttgtggaatcagaaccccacgtcccgagaacaacgcgtgactaccccattagcaaatctgttaatgtggacatgctgtgctcagtcacgaggaggctaactcaattattttccctttgattggcttttggtagagatctagaggatttctgcttgtggttagctttacaacatgttataaatatcaatatactgcatattagctgtctaagaggagacttagcatttcaaatgcttgtgaagaaatggaaatttcaagctgtattaatactgttagtaaaactctgagagccacaaccatgcagccattaaacagctctttcaagccgtgaaagtttatgaatgaaagataggggtacacagggaaatgcgagaaaagaggcagatagtagggagttgctaaaattttgcttttgtacccttggtagctcagagaaagaaagccttgtaggacatcggagatcctgacagaaaatttaaagacaagacaagcaacagttaatacattatctgggtagatctctgccttgaaatgttatcaatattatagagtcgctaattgatggtgtgtaaaacttcttttataagtaatgcatggacacattcattgtaaaaatttcagctaaattactccttttaaaatatgttaattgttttatttgtgtgttttgtctgtatgtacatcggtgtacttagtgtgttctgggtacctgggggggggcgggggcagaagagggcatcagaccacctgtaactggagttacagatggttttgagtcccttggtgagtgctgggacctgaacctgggtctttggtaacagcatcaagtgcttttaagcactgagctgtctctcccgccccatcatatgttagattgaaatgctcatagaatattaaatttctgtgtttttctctaactcttttatctcccacaaacctttatctcacggtcaataaagataaaaagcattcagtttcatatgttctatgcaaccattcaatttgactgttctagacaccctctttctctgtccatggggcagcttcctggggcactgaccttcagctggggcactgaccttcagggccaaagcttgatgatttgaatttacatactctttgagcagagaagctgttctggctggttccccggcagtagtgatgactaggagaaatgagtctctcctgacttgttggcaccttttctggaagcatgtccaagacatcagtcctgttgctgagttcccacccatggcggcctcttcagtcccagagctctcctgctgtattggcccctctcagtactctgctcctgccacacaaggtacctatgacagctttcagatatgttatgtcacacacagccatggaatgccaggcacaccctgccaaaaagagagaaggcaaacactaatgcaggacagaatccacactatagcatgtgacttctctagtcccttcctcaagaagaggatcctgtggactactgttcagtcatcttagggctgagtcctgcccggcagattttgctgtgtaaggggtgtggtgacgctggtgtgcaaaggctgaatatggagccaggtagagtcctgaagggatggcacttttgaggtaaagaaatgttgtttggattccattgaccaggaacaggaagcaaaatcacaaataggatataaccaggaaatatgtctctgcttcctactctatcttggaattattttttttctagaaaccaatactagaaaagactgataggaggaagttgtcaatgtggtctatggagtcccagctctgccttgagaaagtcgtgtgtgtgaaagctagaaaatgatacaaaaccttacaaaaggctcgtctgggactcttcccttcatacatacaggatcatattaatgaaaaattaggtatttcttttttaaaatactgggctgagtagatatttcatttgatattatccatgctctgcaagcatgggaactgcaattggatcctgagaggccacaagactaaaggatctgtatggtggtgcatgtctgtgatcccagcactagagagaggggttagttcaaaacctgtcaccacactaagtcattgagtacaatgaactattgaacagcattaggtttgctttttctctgtctcgtctctctgtgtctttgtctctctctctctctctctctctctctctctctctctctctctctgtgtgtgtgtgtgtgtgtgtgtgtgtgcacgcacacacacatgtggtgtgtgtgttcacgtaggtgtacacccctcagtgcaacactgcatatctggagatcagaggacagcttggttgtcagttctcattttgtgccttgctggagtcatgtatcctgtctgctgtgtacgttagattaacaggcccacgatgagatattctcctgcccccacctaccccaggagggcggagattacagaaacataccatacgcctggttctgggaatataaactcaagtcctcacacttgttaggtacgaacttcacccagtgagccgtcttcccagcacctaagtctctgtttttttacaacagaatctttctgccaactcagagttccctttgggaaatagagactctgtttctgtaaacacacaaatagcagtgagaccgggggggggggatctcccgctcctggatgagagtgcattcctcctctgggtgtctgaacttggtgaatgctctgcctgacatgctcctccacacccaagctgcataggctcctcatgggcagcttctcagaaggacctttggatgcacccattctcaccccatcaacacccccctctgccttctcacccgtcatgctttgctcttgtccacagcactgaacaatgcctgaaactatgtccactgtttgcttccttttttgtccatgtctctccacatccataatagtttccattctctttgctctcccaaccaccaaattgctcactgacccagagcagatacttgacaagacatttacttcatgtcattttccccatcattctccgtccttcctgttttaccattcagtctatttgagcaaatactccttgaattatgacatatacctgggaatgtgctaggaagagacaataagaaatgatgaagagatacactttgccatttattattcatgattcaggtactggatgtagtaatgtattatgaaaacagcgtgaaggagacccatagctgaagcgttgaagggcatagggatatgatggttagaacacctggataaaagagtcagaaatccaacccagattgcttaaacactaaatagagtttattcatttacacaacttaaaaagtccagtcttcacataggaatgtccatgtaatattgtgggtaaccagacgtcctccatttccagcctcgtgtcttacgtgtgcattcataggcagagtccatctcaaccaacaggtacaatgatgccgctagggacaagccgcttatactctgttgattacagggcaggacttcctcagcagagtcttgactgacttccattggcaaggtagagccatgactcctaaacacacctatttttcctaactggtcactttggacaccaggagacaggtcagggtctgaggagtgtttagcacgaatttcttaggatattgctttatttcagtctgtccatgttgcatcagacaaagggcccagatctccactatatgtatcactgtgtatcacagtgtatggatacactatgtgtatctctgtgcatcaaatctcacattttctgctacttagcagcttttcagcacctgttaaagaaagaacaatgcatgcctcctgggagtatgaaaggagtataaaattcactcttccagaatcataaaagaagactctgtgagcaatagaaattaaatatatgacagcttcctagataaaacaattgcaaataaattaataaacggcttccatcaagaacaacgagattggcaatgcagtccactctagcggtcacctaggaggcctaggaacagttccagggcagcacctctgacaatgccatgggccggtttaacagatcagtcaaggtccgagttcttgttgccactctgtgcctttcttatgcatgaactgcctcttccttccccactcaagacaaaactgacagctaaaacctactgaatatctgtaacgccgaagtctgaagaaatagctaaaacctactgtgttagcatgaatcgtcttaagtacttactactcatgtgtgttaaatccttgaatcttacaatggcagggcagtcacttttatcacccccatgctatccatgaggaaatgaatgccagagggtttacgaagtttattcaatatcaaacaatgccagacagacacagtctttaaatattcaatgctcttgccagaaaaccagtttaaaccctgtcatggtgaaggggactctatttctccagcccacatttaggatttctttgtacacctctgactttgtttactactgagaagtgcaattattatttcattatatgttacccttaaccggtaatggacttaacataacatgacctgtgtcatatctaattttctttactgatagcttaatgtttgctcactgtgtctattcaaatgtggtgtgaaggcaagcaacaaagcattggcctggaatttgattctcacccttctatcggattagctaggtataagatagatgctcaatgtatagacattaattagctttgattattaaaagttatttcctaaggatcattaaggtatgatttttgttgctttttaaagctgtaatttagtctcacctggttctgtcagagcactaagtggtctttttcatgagacctggagtagggaacacgatttattccccactcattaaactgtgctccacaacccatatgggtggcagaactgaatgtgggggttacaaaaagactggcagtgctaaaggttttcttaacatgcaactatcaaatattaattgaggccaggcagtggtggtgcaggcctttaatcccagcactcgggaggcagaggcaggtggatctctgtaagttcaaggccagcctggtctacaaggtgagttccaggacagctaggactattacacagagaaaccttgtcttggaacatcaaaaagaggtattaacttgaaatcaaacatttattgaatatgagatgcttctggcaacacttgcccacattgcaccggggccttcactgtcatcttggttctggacacggcataggcatagctgtcataccacatgacattaacaaatgcttcctgaaacaccctggtcagatttcagattatatgtatttatgagctgcatgatttttgctggaagtatgacgttttctgctcatagaaacctaatgtcttaattacagcaacagatgtaactcatgagcatggaagcactaaatcagcatatctttgaattgtcctgtattagaatgctttaaacttgatattggagatatctcaatagcaaacagatttgccttagtctttaataagtgataacattatattatacaaaaactgtttttaaataaacatccttatgatttattgtcagtagtctttgatccacatagctactggatatgccaactacctatagtcaagaaaaaattctcaggtgagaaatgagtgatggatgaaaaagtcttcatatgaaacagttctatggatacttgaagcaagcgatgctctattgcaagggtggtaactgccctgaaggagcctgtgtgtgctgtgctcagtggggtggctcatgatgtggtcattcaataaagttttttccatttgtcagatgaattggtgagtgactgtttccctagaagaatgagatggtactaatggtggctgtaatctttgttgtttttgaagctgtgggaaaagcacatacggattgggatgagcttggttgaaacaacagaatatcatctggcttttttaaacagaaactaaatgtatttagtttatggatggcatggatagggtgggttttcttacacactctgtgacaaagagaggacccagttttgaagctagagtaatgggaatatagcccagtgcttagttgggcaactccaggaatgcccactactgccattgctgctgggtctgggaaccgcagccttgataataggaaggcgttaattatcaggttgctcccttagaactcctgccactacttcctgaaagccgacttcagagagcctcttccccatgtcactctttcagtaaaataaagctgtatatggatagaagcagctgtaccatagacagaggaacttgaacaacaaatgtctgtctggtttttatcttagtgaaggagtcagataaaagaagttcagaatacatgagaaaagttactgggatctgtacaatatgagtttagctccttttttttagatggtagaatttaagagagcacaaaatattcactttatttagagaaataatggttttcaacaaacacttattaaccttcaaagctaacaggagttgtaagaatacagcctgaaacacatacagccttcaaccctcattgtggaatggatttgtcaaagtattgaacaatgaagacaatgaaaaatgaaacaaaatgacgttcccacaaggcaaactgtaatgatggctgtgatagcagtgatgatgactggacattctctgactaaacacatggcaaaaaaaaatcataatttctgactcttgcaacattttgttaacaaagaaaaagtgtcttaattgtttggcatgtttgaagctgcagccagagatttgcatctcagtttggtaaattttacgtgccgagatctgccattcctagttaacaaataaacatggctgagcaccaattagagggatatgtcagcacatcagggccttggaagaaatacgtcatgtgtaattggctatgtgttatcgtctaaatctaacagatccaagagggaaaggcagatgcttcagtccctgaacagttcatgtctccagtgcacacacactcaggagagcctgcctgagtctgtgtcaggaaacatttgaatgtccctgagatgtgaatacatatgattcttaagtgtgctgaccttctgggggtgtgtggcttctgtccatcttctacctgggaaatgcagcagtcctgttgcagattcttttcctccgtactcctactgtcctcttaatccactgcctctggtagactaataaagcaaagagcatagaggtgatttcagatttcaattaataagtatcataattcctttttggggggccgactctgtctcacagaaacgatgggcaaatcgttgtccctagggctctctacttttgtgaagctgatcgtttgtctcccaacagccacaagagcagctggtgcagggaaagggggaaataaggatggaagattttcatagtttgctttatgttgctagagactggacctgggagcacctgcttgctaggcaaacactccacccctgaattttatctgcagcagaggttgccctgagcaactcgcatagccaaggattgaactttcaatcctcttgcctcctaagcagttggaattacaggcccatgcctccatgccctgtggataaataatcaatcctacaatgattataaaggttttctcctctactcttgggaaactctgaaagttcattagaaccttctttgtcactgacataactcacagggaacttggaggccttagcactatcatatccaacacaggaaaagactctctgtgaaagagaccattccatatcttccatgagttacagatactttacttggaattgttaaataataataataataataatggctttactgttgatagtatgctgactcaattttactgagcacatggtatgtgataggctgttgtctaagcacttctcacgcagtcatttatttaatcttcattccagcctcatcagggtagatactatcattaacgtccttcttgaggctcaagggcatggagaaattagacagctcagtggctgtcacctggcagcacaagaatatgactttaacctaagaagattagcttcaagttctgtttttcagaattgaaggttaaatgaactaagttgagcaaggcaaccccgtcacaatcttctcatcatagagaaaaactatctgtcatttgttttccccagaaagaccagaaatcaagagactattagcacagaatagcttcattgtctccttgaagctctctgtaagcacacagtggtgttctattgggatttcctgtgtgcttattgctcggtgaatgggatcctccaggctgcccctggttctaccatgttctagtgtgtgagctgaagttcctcaaaacaagcagaagtcacaccagcattaccatgcacacagcaattgtcctttactcacgtgagatgaaactctgagtgaaacaagtctggtttccctcttttgcacctcaacaggaaaacctcctttattctgagtataacttgacatttaccagaacagagtggaaaagagcagaggagtcagggaatgaaagttacgaagttaagcatgcaatctgaaacctctggcttctgcaccagggcttcacaataaggtttctgcatttataactgaatgcagaataataactgatatgcagaataataacagaatgaataataactgataatcatcgagtttacgcaataggaaaatgtaagctttatgtggactacacatgaagtctcttgaatgcttaattacagccatcttgctcaggatagccaaagactgacggagaataaatgtgaggaacaaggtatttcattcaaagttaaacaggaaaaaaaatgtgtcatgtgcccatggcaaaaaattcatgtaacatgcccttgtttagacttcatgactttctgattttatccttctatgctttacttaaaatattctaagttaatttttatgtatatggcaaatgcaaatcttatcttataaatatatgaagtgatgggtatgcagccacaggattaactaagttgtctgtactcatattccagacaagtcagaaatagaagtgacatgatgaaaaaaagtatattcaaatacgctagataaagcatgctgaaagaaaagtaacgtgatttctggaacaattaaaattgttaaaaagaattatttatttgtgggtgagcatgtgactgtgccatgtgtggcatgcggaaggtgacaatttggaggctgtcgcctcttgctctttaccatgtggcatccagggattgaacctaggtcatcagacttagtagcaaggacctttacccatcgagccatctttctggcctccttttaatcatttaaaaaattaaaatacaaagtaaagtgcctcagcatggtgcttcttatgtgctttttcttattcgcccctcctccacaccaatctcatctcccttcctaatagagtccccttgctgctgtatcacacgtaatctatcaccttctttaattatctttttcccctttctctctccattaagatagctcccttcccaaccatgctcactttctagtttcattgcttacagtcacattaagaattagaatttaagtctccatatgaaaaaaaaaagcatgaattaggctaagtctggttcatttcatttaacataatgattttcagttccatccattttcctgcaaatgtcagagtttaatgtaactaaaaatagcaggctgcagactttgagcagtactagctagaactacagtgtaaagtctgaataatttccatgaagaaatgtatctgtgtttgaatttttttatcaaattcaaacactttttatgcaattacatatatacacaaatgtgaatgcacacacatatatatctatatatatataagtacatttacatatatatgtaaataatcttagcctaattagcttctctaagttgtaaatttgctctaacaatgtctcttttaccacaaatgagcaacatctacttattaattatcaaccatggaccagacctggagtttaatattgcagacaggagaatgagtaggtgctatgcagttcaagactcagaaatgcaagagtggctcaggcagatggacacggctcggggcttctcaagggcatacgtatggtcaagaattaggtgagagtcagaatacctgaagaactggcagatcctgcatatgttttgctcacatgaatcactggttcattttactgtattggaacttaactcttagaaacatgcactctgaaacatttattttagaaagtcatgaatccattatgtataaaaattgttatacaacattttactctttcagaaattagcaaacggtaatatgtgcaaggaataccattatcttatggatagtgtttagcgttgtcttttggagatttgcaagtctcctaaagttctagagtcttacaggcacgttggctgtgatgtttcactttatgtaactttgggaaaacttcactgatcgacactgctcaggcagaggtctgcaccaagcctcagcttgttaccatagtgacactataaggaatataggcatagaggctatcttggatatgagaaattacgaaggcaaaactaagaaatagccactggtatggagatttgcagtaaaatgaacaagttgctttaatttcctataaattatgagaatcctgaatgactgctttagcacagggagcctcacacattaagcaagcaatctgccactcagctgtgtctcagatcccaaaggcccacagttcccttcaaactccaatggataagatgtttcctgcttgatagtaacaacaataagagtggtggttcaatgggattaaactgatgtttcaggattggagtcaatcgctatctcaatagagttccctggaagcagagctcgaggttcacattcctcttctgcaaggcactggaggagtggactgagatggagaggggtatcagggggggtgggggcttttttcagtcttagcccctgccacatgtcccactaaaaacctgtgattgtcaacaatgaatagtcagctagaaagagtctcagtgagagattttctaattccattggcctgtggtcttgtctatgtcgcagtcaaattaattgatatgggaaggcctagcccactacaggtgacaccattccctatacagaaggtcctgcactgtgtaggagtggaaaatctagctaagcacaagcaagctgaaaagcaagcaaggatgcatttattctctctctgctcttgagtgtgagtgtgataacaccagcaatctcagagcttctgctgttgttacatccacacagtgatggtctgtaaccctggaattgtgagatgaaataagtcctttctctcttaagctgttttgctttttggtttgtttgtttgttttgatcagcttattttgtcacaaccaagatgaaactaagaaaagaacttatcctgcaccagactttcgaaccctttggtcatcagaaattgaaccatgtctaggaaatgcccccttgtgcaccaagctcagtccaataagccaagggagactataggagaaggaagaaggtggtgatgagtagctatctatgtgttgctagagtcccggagtttcagtgccacccatgtccataaaccattccaagacataatcaagagtaaaaggcacagaaaggagacttggttaatatggccacattacagagtgcagctaaagggattcaggacctcaagtctctttaggcaatgacatatgctttagagcagacttgctcatcatggttctgcaagggggtccaaataatgacttctatctgtaattactagacaggagcatccagttggctcccataagatgattgttcctactgtggagtgcagtacttcatcatacatgtgtgccctcatggcagggagggggtcctgtgctggaagatttatctttcctttgtgaattccttctggagataaaacagcatagtcctagaactaggcaactagaggctagactaggaaactgggtagaacagagctacccactcgcaccagttagtaagttaacataagcttgagtccttccggaagagggaatttcagttgggggattctctccatcagattgacctgtgggaatgccaatggggggcgtcttcttgactaatgactgatgtgggaggggaaagtgtattgtgggttatcctggggtgcttcagaaagcaggctgagcaagcagtgggtagccagctagtaagcagtgttctccccgtctctgcttcagttcctgtcccaggtttctgcttgagttcctgcctgactttccttaatgatgaactgggattgggaagcataaggcaaacaagccttttcctcccataaattgtcttaggtcacggcacttagcacagaaatagaaggcaaactatgacactagtttcttcaaaccgaaaagaaaaccagggacccagaagcaagaagaagaagaagaagaagaagaagaagaagaagaagaagaagaagaagaagaagaagaagaagaagaagaagaagaagaagaagaagaagaagaagaagaagaagaagaagaagaagaagaagaagaagaagaagaagacgacgactcagcactgtctgctgcatagactccaatatccagggaacatttgaaatcatgtcacatttcagggtaactgagaaataccagacatccatccacagcccctgttttttttatggtgagtacacaggcagagttactgtgtcttccattttgatgtacaggctccagaactgacatgctacagatgttctttctagaatgtagctgagtccctagggaaacccagttcccttaaatgaggtctgtttccaatcccttgcttctctttcccttctctgctttgaggtcccattttctgcacatgcccacaggagagcttccagccaggggctgtaatggctaccgtgtgcctggggaatttggccctatgatgacaatcagacattttcagggttctttccaggctgaggccattgcttgactctcacatctcctcgtcaagggggaacatgggtttgcagaaagatcttacttctttgatttcattctgtggttttgaaggtaggaaagaattacttctagtttgaaattatagctaactgcaggtaaagaatgtgatgtgtgtgcctggatccactagagccaaggacaatataaagaaccagcctatgacattaaaacgtctacaccaattatggccattgtgtctgggttcagttctcattagtgagccagccttactgagggatctttgtgtgtgggcttgtgtcccaagggagggccacagagccggcaaagcagctggtattggcatggtgacagtgaatctgaggagagagcttggcactgaggtctaacccacctatgtgctcacctgttgagaagtgactagaactgagaggaatagagacccgacatttggaggtggcccctatctttgaaaaacggtattctgcatgtaattacatatcaactctttccctggatattgttcaaacttacatgggagacaatgcaattcccagttcacaaaactccagaaatggaaaagcaggaaacagattaaaatgttctctgggctggagagatggttgataaagcccttgccttgaaaacacaaggacttgagttctaaccctagaaccacaagaaaaagccacaggaagtggcctgctcctgtattcacagcactgtgaaggaagagacagtcatgtccctggggctcactggacagtcagtcttaacaaattggcaagctccaggccaaaagagagaccctgtctcatcaaacaggtgaacagcaaggaataacatccaaggttgccctcttgccgtcacatgcgtgagcacgcgcgcgcacgcgcgcgcgcgcacacacacacacacacaccacacacacacacacacacacacacacacacacacacacacacacacacaccccttatatgtgtgaattgatgaatatcaaaatctgcactgagttcctggttcttagacatctgtgctttataatgaacattttagtgttcattcattgatctggaaatcaactcaatacatcataatcatcctttcaaaaaaaaagtcacctctgaatacattacagagaaacagaatgaatgccagtgagtgccacaagtagggaccacagggatgttccatgaagccaccattttgagcaaggttcctatatgagtatgtttataatacgcaactccttttgtaaactttttattattgtgttttattgtgtgataggtgttttgtctgtgtatatttatgtgtgccatgtacatgcctggtgtccacagagcccagagaaaggtgttggatctcctggtcctggagttacagatagttgtgagctgccatgtgggtgtaaggaatgaacctgagtcctctgcaagagcaactggtgttcttaacctttaggccatctctccattcctaagtctttttattatactcttgctcaagaatgtttgaagctatcattcaaatgacaatgaagctcagttagaagagcaatgccgtcagtccctccgtcctgtccgtgtgtccctctctgcatggactgatgttccctggcataaacatgaactcggcactctcaactgggtctttccgaggaagctgaatagattcaaaggagcatctggtcttgacgccagaggctcctgtgtgcccactccaataattcccttcctcgcccttttcttcctttcctgcctcccttcttgtttcctttctttatgggaggctgcagtgtatatttcagtcaggaagatttaccagccaaggcaaactgtggatggaagcttaacttgtggcaaataagcaattaaggtggaaacaatgtccccacacaccgtcgccaaatattcccaccctggagcaggttcctgtcacctcacaccttgattattgatgtggcgcccagctcagtccctgattgcagcccctcctcaaggggctccattctacccacttaagctgaatgaatgctttgggtatattgttattatcaggaatttccctgctcaaaatgacctgggcttttttttttttttaacctataggtccagtctgaactccatagctgagtatgaacgctccacattgggtgtcaatcaactggccagactcatctttacatgttctcaacttgagcctaatgtgtttgccctatagcctccggatgcaaagagtatgtgatgagggagtcaaacaaaagtttcttcagtgtcatcgaagatcttccagtacaccagcaagcacctgccgggctgctctagcaactgagcagatgggacagctgactgcgtgtgtgttgtggtgtgtgtgtgtgtgtgtgtgtgtgtgtgtgtgtgtgtgtgtgtgtgtgggccagggagtggttattattatctctgttcactcaatgagaaagttaaactccaggaagttactccatagacccaaggttacacattttacacagccccttcattatacctggctttgaaccagtgtgctccgtggggaaaccagaactactccaggtacattactgaagcgaggccaagttgaaagcgaagacataggaatttgatcttgaaacccattagcagtaagtagcaacaatggatccctaacaataattccagatgcctggactttgcatatcacctgtggtgacatctgtcggtacctgtgcccctcaggggatggccaagcactgttgagaatgtgttatgccacctatacgcactaagtcagttcatctatgtcagtctgtctctccatataaagtaagttctcagtttggcggacagcgcctgctttgctttgtgcctgcactctggtttaataagcacatataagcagcagaggaagaaaaagaatatcagtggtggcttatttatagctcacactggtctttcaaagcctctgcttccagaaccccttatattttctgctccatgaagtcttaatcagttccagttgaagtaaaccattccacattctggctatgagaggaaggaggaagaaagaggatagaaaatatctctatctatctatttttctatcaatcaatgatctatctatctatctatctattcatccatctatctatttatatatgtacctaatctatcatctatctacctacctacatatctatatcaacatagacgtccccccccctctctctctctccctgcctactctatagcatctatcatccacccatctatccacccatctacttacctatctgccatctgtctatcgagaatgtttccaccaactaccagggctttgagctaatatagcctaccccttttcttccgtgttggcgtatgttagcaaatatgatagcagttagacaggcctgctataattttcaatccttttagtcctctttatagtaatagaaatccgtgatctgatctttgaagactccgtctcatatggaacagctgcatctcagcgctctgtgttaacgaacacctggggtgagcctaaccccgtgggggcagcgcacagctggccccaggttcctcctgcaataatgagggcttctctccccctctgacctcaccttcctctgcttaaacctgctgtggtgaatggtacccttaccctctgacctcaccttcctctgcttaaccctgctgtggtgaatggtacccttaccctccgaccctccccaaatggctcaatgaatcccatacaggctcataaaaatgatttgctgatttgccaggaggaaggggaagaaaaaccagagttgacttttagcttaggaatggctcaccttactcacacactcttattcctttgattctgtttctagaacagttgattatctagaagcaaagctaagcttgaaacaactatgcaaccaaatggaaaacaaaagacagcatgttttctcctctttaaccattccttcaaatattgaagcaaaactaacatcatgttgcccatggcctctgtaacatttgaaatctagtcacacaaatttcaaattactaggaatttatctcatttaaaatggatagcacatttatttctatcatttatatttcagtcctattatgagtttttcctcccactagtttttgaatgattaaagccaaaatttttaaattacttaattcaaaccacctctacactgatgcttttattcatccaaagcatacatacatgaattagttaacactgattagctgaaatcactattctttctatggaaaagcactgcattgtgttaaatacatttgacaaagaactaaaagccaaagggcagatgagaaacttcacttcaggtgttgtcaggacatttcattgtttaattccaacacagtaacttagtgtcccggacaaagaaaagaaaacaaagaagataaaataggcatttgggatttttcttagcctaaccatggtgtttggatccctgttaggtccttgggacccagtctaaagctgagtgtgagagcctcagcaattaagaggactttacagatcttgcagagaccagaatttgtgttccagcatttgcattccatagttcactactgcctataattccagctccgggggatccagttccctcttctggcttataagggcacccacacacatgtgcacatacatacatgcacgcacacatgagcatgctcccacaatcagacacataaaaaccaaagctgggcatgagcataaaaccttctccattctgcctcaacgagggtggtgcctcagcctaaagttcgccatccactctttcagtttaaaaagaaaattccaggcttctttctattatttcttcatcttctatagacttttcttagctaccatatggcatactaattatagtctactagtgctgaatttgaaagactactcctgctttttcaaattttggaaaaggtcaagcttgggcaagtgagcttctccatgcatggctgattggtgggtcaacccaagaaagtcagcacaaagaaaccagctctacaaaagcacacttatgctcaacacctgtgtttctagagcaatatcactgccttctgctgctgccggcaagcatgtggtaaaaacattgcctttctataatatgtgcctattttctagtatactagaaattgggtgcatcacacatttagcaaaaatacctctttattcttaatatgtttccatgttttgtaatttttttatacaccccagtagccagcagaataaaatgatcaattttatttccatttctctctccttttagtgactacctagttcttcagatagtaagtgggataagcaatttggtaaataaagagggatgtttatttgaatggaaattagaattctaaatgtaaatatttattcattgattgatgatatgcgtgagtgtctaacctgcatgtatgtatgtacaacacaggtgtgcctggtgtctgcagaggctgcaagaagggattggatcccctgggactagagttacagagactgtgagctgccattctggtgctgggaattgaaactgggtccttagaaaaagcagccggtgctcttgaatccagccctggaattctaaatttaattgtgaacataaatatgttatataatgcccccccatttctgcatcaaagtaataccgaggataggggaagattttatctgaagtatttttgaggttcagaattctattattcagtcacatttaatttagattaaaaagaaaaatagctgattactactacaaagctggatataataaaaatcaaggatatgatacttatctattctcccatgtatatatgcattcatgtgtacatttatacctctgtcacattgagaaaaattgaagtgacttaactttgttttatatgaggtcacaagctaaaaagtaaaaattttaaacaaaaatttaagtgatgtgatccagaaatgggaaatgttgagggaaaccataatcagagtcagtgaataagaattctaaggaccaaatgggaggcttcatatcttaactggagtgacaggatgaaaacacaagtaatattctcggggataacataggcaacagagaattcgacttaattcaacccagaaaatctgttagagggaggaaggagctaattccatcccatttcttggaaactcttgcaaacagctgtacaagcattgagcacagggaagtatggtggtgaaatttaattatcagctccacacaacctagagtcacctaggaagagagggattatttagatcaggctggcctccaggcttgtctgtagaagattgtcttgattgccataactgatgccagaagacctcacctactgtgggcagaaccaatccctaggcaggagagtcctgaactgtatgagaaagaagaaattgggctgacaaaagcaaggagacatgggtgcgaccatttctcccggtaacgggcatactgtgaccagcttcctctagcctctgatactatcagtttttcaagtggactgtaacctagaattgtggaatgaaggaaactctttctcccctaagttgcttttgttggggtgtctgatcacagcaatggaaatgacgctaggaaaggaaggaggaagactgttaaagacaagagttgaaagcacttacaggaatcctttcttctcaaggtatcatgtgaaatattctgcacagtgtttgaaatctcagtctcctgctgatggtgacacctgggaaagatgtggaagctttgagaggcaccaggcggagggaagtgagtcactgggggtgggccttgaggttcatatcctggcccacttcctgtcatatccctgcttcctgtcctacccaacatgtgatgtggacatctcgtatttttgctgacacagctgtgagctactccatagacagacagccttcaccactatgaagcacagtatctcttcaagtgggagctaaactaaacccttcctccattaagttgcttttgtctgatggtcttctacagggaaagcaaggtgacgcaggagttcgcacactcttacagaagtgtgcaattaggactagggtcctctagctagctcccacacctcatcctcatgtttgctttgttggacattctactgatcagattgtaaaaacagtcaggagatatatatatatatatatatatatatatatatatatatatatatatatcaaatgctactaatatccagaatgttccctaaaataattctcaaagcaaaacaaaaatcaagcctcaagactaggggcatgtaccatagcattaagaaacaaatgtttaaaaggtaagattcacttattccacgtttgttctgttctacgttaaagagaatgtcttaaatctgaacaaacatttgtatcacatagttaaaaatgatgggcattctgtcagttttcgactgacacagtgagtcaacctgacacatgggaaagggatcactacaagagcaaatacggaaatacagaagcacagaggtgactttgtacactctgagctgtcacatagaaacattgggtattgaatttttatgcaatacacacatgtgtgcatattctggaaagccaggcaacagtatgttatctgtaaagatgcgtggattcatggatccactgttttctcctacagggtcactcataccaggagaagtcaaactttagtttacacaaagtaaaagggccaggctctttaaagtccagtgtatcctacagtcattactgaagtgctttcaagagtccccaggaaggggctccaggaacatgagcaatgtgggcttaggcagtttgaggctgtcctccagcaaaacaaggacttctggctggcagaagacagcagtaatttgggccaagtgaaataaaatgaaaagggacttggggtttgtgaacctagcactgacagctgccattgtgagctcttggagaccttatctcaagtgaactgatcccctttcacaaaccagtgtcctgaaaccaaccagaggactgaggattggacttttcaacccgtgggtgattcccaggtaggaagaagccctaaagtaggttggaaccagaaaatcacttagtagaacttcgaaatatccctttatactgtgtgaatacatgtggctacaatgggtttaatagagaagcttattagccaatagctggataggataaggttagggggagcagccaaacagagaatgctaggaagaagatcagagtcagaggaatagagagcagaagcaatgtggacatgctgtcctgagaaaaggtagcaagccatgtagcaaggcatagataaaagtatgggttaattgaaaatgtatgagttagctagtagcaagcctgagcatttataattaatattaaacctctgtgtggttatttggtagagggtggtcaggacaggaaaactcactcagcctcaaaacagcgcctagacaagtatggcacacagaagagcagattatcagtgattttatgaggcaaagtcaaagggcttttgattggcaagatcaacaagctttgaacatgctctaccagagaacactggacatcacaaagacagtttagctagggatgtttagcccccagtgaagaaagaatcaggagagagaatggaagggaattttgtttcacctacgctaaacaggatagcaaaactgaaacaaaacagtagtggaacacttggcccagagtaaagaactttctaatgaaaatttctgcatacatatgtcaaatgagggcatgagaacccattcttcctagctgaggttggaagaaacgtggcagagatgtgagggtgttttcatttggggctaagggagagaggaagtttggagtgaagactcacgtcctattccaactcagttattccatgattctgtgaaagcagttggcagttttcaaggaaatggctgacagacaggaagcaaccggaagcagaaggagaaatatggaggagcctggagagtccattaatggatgcataagtctctgatttattgaaattggccatagttattgagcgccattcaaaattcctgctccagttgtgaacacttggaaggtaatgggaaaaatttcggtaacagtggacacacctttgctaatgtccgcttaaagaaagccaggaggggaaacacttggaaaattttcttacacagaaaatgaaaagaaagtaggagaggaggaggggcaggagaggaaacagtgatgagaagggagaaattcagtatatctgctcacctttgcgcacccctattccccactctctgctgctctggctgtgtttaagacatctccgctgggtctaatcaacggctgaccacatctgtttgattggaagtgtacgtcatcttggttttggaatataggcaaatatgcacttagttctcctccaagccagaagcttgctcaatgtttaaggatggagctagtggcgagccaggaacaatggtcagagtacagggagccgttcactagggaggattagattgttatcgttctgcatgctggggctacttctgtgacctctcaaggaggccatcatcccacccatgcagcggaacctcacatgaattacagtgacatctccctgcttcatctacggaaattcacttttccaggatctcaagctattcctcttaattaacaaattaatctttttacacagttcatggacattgtgacaattaggcaattattcctgtttttatttatgctgggcatgtggtacgtgcgtttatatcttcctgtacgtgtgtgtgcacctgtgcatgtacagggttgtgtgaaccctgtatggaagccgaaggtctacagcaggtgtctctctcaatctctctgcagcatactttttgagacattaaacctctctcattaaactcattaatgtatctagttggccagtgagccccgggaaacctcatggctctgcctcctcagcactgctgttgtgggtgtgtatgtaccacagtggccatcttttgctttctttggcttggggaaccaaactcagatcctcacacttgtgtgacaactgagccaccattccagacaaagcattgtagggaagaaatccagaggttaagagtggagaggggtgtttcttaggacccagtgcaagggttatgcaagagactgggcacttcttccaggacacagtttctgttactgttgctgttttgtatactgctttttgaaccattgttttgttttgtaaccctggctgaacctgaactcacaatcatcctgcttcaattacaggagaactggatttcccagtgtgcaccaccacattcagccctgaggcttttattaggatttataacctctcccaagtttgggactggatttgagtgaggattaagttaccttggagaaatttgaaatcacagaataacagtgcatccatttgacttgacatggaaatctaaaacttgttccaatataagctccaactactcaagccccttagagagaggacatgaagaattggacttatgattatttcttacggaggtaaatttctaccaaaactaagtatatatttaagttccaagttagttacaagcatcctgtctaatattgtgtgcctgcttttttatttaggcacaaatatacacagccattaacaaaaaaacagtgtttggatgtaaaagttcaactgtttcagttttatcattcctttttcaaaacataacagagaattgtgaaggtaaatgttttcttgtaactagcatatatcctgcatgctagtgtctttcactttttacctcagatgtgatgtcaaaaagacaggtaaagttcatgtgaagttcatgtactatgttgtagcaggaaagtaaagtggacacagaatgtgacaacgtgatagaaactttgggtatgcttatagcaagaccagctttcctacatatctggactcttggtggaccttacactttggaataaaagaggccaattaactagccagatacctcaaaaattgggttgactttatgttcattacttttctattgccacgtgtaccctgacgagccgcaacttaatgaagaaggagtggattttcactgatgattccagaggcttagagtccatagtggaggggacactgctgcagccaagtggcagacaaagcagctggggaaatggctcagttgctaacgtgcttggtgcatgtgcatgaggacaccagtactcatggtgctttgctgttgtaatcccagcactggggagggaagaggtagggagatctctggagctcaatggccagccattataactgaatcaatgaactccaggttcagtgagggaccctgccccccaaaaataagatggagagaagttaaagaagacacttgggttgaactttgaccttcacatgcccatgtaattgccctaaacatgcatgcatgcacacacacacacacacacacacacacacagagagagagagagagagagagagagagagagagagagagagagagagagagagaggaaatcttgaagatacatttaagtagaaactctggtatgtttcagaacaccaggactgattctacataaaccttccctgagatctggagttggctttatttacttatggagagcccaggatcccagagagcagcctgtgccttatccacattttattaatctctctggtaaaagattctggaatattgtttagtactgggcacgatgccagaggtcatgggttgccaggaaggatgagaactctccttagatcaagggctcccagaagtaggtacacaaaaacaaaaggagatgtggacgggtggaggctgggcgtgggtccctttctttctgcatttctattttggaccacttgtgtggaattgtaagggtggatgccatttggacactattgtgaaagtcgccagaagcaagatccggcttcttggtttgttttgtgtgtaggcgagccctaaaaggaaactggaccagaaagtgttctttacagctcttactgtgaacttactaccaggaggcatatcctcgaatcacactttgcctgcaatacaacaaaatgagcaccattacactctgcagaattcagatccattcggggatccggcatgagtatatttacgttagggctgttgctgtaggacatggaatcttttctttctactcttattaaaaacatactaggcaaggactgcattctttcccacatgtgctatctgtgcggtgcctaggccctgggcacacgtgctcttccaaagccacttgttttctttctccatccactctttcctagtcatcacactacaacgcaaccattccacctgccgtcatacttcaactcttgcacagtgtgacttggacccttcgcttagatccagaggcccacatccaaatctacagtattttatcacagatgacctgtctgtgtaggtgaaccttgtcagaaacacccggtgaatctgttaagggtatgtgagagccatgtcccaaattgccattttttttctttttttttatgattccagcctaagtgtgtaccacctgagcacctccagtcaacaagatacctggaattttttttagtaattggggtcactccgtgtgatgtcatctgtgatatctccaagaactccaggaaagaggacgtgtgggatgagacagtcggttatatgtctaaggtcagccccacccctctgacctagtctttttaggtctctgtttcttgtgttgattccactgtgacttttggggtggggttcttccccgaaacacatacttcaacgggtcccaggtttgatctttcccacgagctctgggatcaatcttctaaatgtctttcagcattcagcctgggtgactaataagcccctcacacttagagaacacaaaactgggctcttctatgtcccacacctagtcccaaattcttatccagtgcagaacatggcattagcaggagtctagtttctagagctaggattccagggatatatcttagaagttttttcttctcccacctctttctttcacacacatccttccatctgcctgttctgttttcaaaatacacagtgagtgcaatcatttctcactttctccaacacccgcacactcttnnnnnnnnnnnnnnnnnnnnnnnnnnnnnnnnnnnnnnnnnnnnnnnnnnnnnnnnnnnnnnnnnnnnnnnnnnnnnnnnnnnnnnnnnnnnnnnnnnnnnnnnnnnnnttcacttgaagagtaacagtagtctccttcctactgtattccgtctatcctcaccgctctacattcctttctcaaatgtcaccgtgagcccctgaaaacataaatcaaaccatgttcctcccgaggcctaaactgtctagtgagacctcccttcagttggacggaaatctatacactgcagttgactaggtgctctatgaccctgcctttccttacgtctgtcaatcccctttcctggtcttactattcctagaggctcctgactctagctttaacacaaggtcattccacctcaaaagatttgatcttgatgttagtctctggatgacatgacttgtactttcattaggatttcatagtcttacaatttagaattttcaattccacatgattatttaattttcatccctacttgggatgggaggcagacaaactgccattaactagaatatatactagttttaggacttacaactttaaggcatgtggtctatttgtttactctccccccacacccatgcattgtcaggaacaaaaactcaacgtagctaatgcctagttcatagcacacatcagggattcaacctatgcttctagactaaatgaatgcatggggcttgccagttgccatcataaacgtcacatttgtagactacaaagaacatcaatgagggaagtacagctttgactgcttattactctcttacctgcttgtctgcagaacaagtgggttgctgctttttctagcacagtaagtatcccacatgtgcctaaaaaatcaatgatgccttcattccaagggattcttgagctatgcattatgtttaataataataaccttataattaagtagggttgtgtatttgtatattcgtatttattcatctagtctatgctatgctctatataggtctattgatttgtatacgtaaagcatttctccttgtgtccttaacttctatggcttttgttcacttgtatgtaatttattacattttttttccagcatgattaggattgccagtgacaatactcactgtggtcttatgctttgcattataagtaaatagaggtttggaattacaatctgctccttgtctcttgtgctgcctcagatggatgccaagcatctcgagttacatgacgcagcatcaggaagtctgttagtaagcacctctccagcatcagcattgtcccccagccctggatgcagtttatttcactttacagaacaaatgcaagatacatcttgtccaaaactgagtgggtacagcaggatatgaccgtgtgactccagctggagcagtaataatcccagacactccttggggcttggtttctatacctcagacagtgtaaactatgggctgtgacagactgatccctggataaccttcttggcaccattcagctgactagagcagggcagaatgaggaacttggattgaggagctggcttcacctgaaaatatagaataaggcttcttaagaacagcagggtcatcctgaaggaaaaagctggtgtagggagggtcatctgaaggaagtactaactcagcctaagactgtactaccaagatggcagcatccatctacctatcattagattacttaggcatatcaaaacagaaagtaccttgtatccttttggcatattttctatacacctttgagtgtctgtcatatccagacatcctttctaaggtgttcctcactcatatggcttaagaatgtgctagttagtcattattggttggccacaagaatatctcaactacataggttgaccagaaagcttattcagtgggaaaccacaaggactcagggaagtccttgattttctcctggattgttagtggctgaacaccttaattctctgtagagaacgaattcacagaacaaactttgagattctgaaattgtcaatagaataagttggtaagcacaagctaacaattgtaaattaaaaaaaaaaatcacccagggaatgattgacagttctgtcatcattaaacctattatgcttttaggcctccttctaagtcataggttatgaggttgtgcattttccttctgtctcacgtgaccttgcaaagaactcgcttttgttagaattagcagaagacagttctttgcacctgaaatgaggccagagtgataatccacttactgaaccacaaacagtctttggttgttctttaccatccagaatccttggctacccacgacagtcaaaatctgtctcatttcattcccaaacaagtaatcactatgtcttcctgttcatattatatgggcttctccagggaggcagaactaaaatgaactcaactcacaagagggcattcactggataagctcatgtgagcagaagctgatttgtccaagaagacaagagcttcagagcaagagagacaagcaaggcttcaactcctcctttaaagacaaaggccccagcaccctacccccacccccacccacaggtgcacatgcccattctgaggcctagtagcattatgagggacccaggatagaagtaataggcaaaggtacctgctggggattggagacctcaagggagagcaagcatcccccttcctctactttccccctccatcactggcctgttgaatgccaagttgacaaaataaccaccacacctaggataaaattacccagcgattctagggcagaagtgggggtgggggagtaacaaacaaagttcaaagtcggcaaggacttgaagagggagtagatgctgtaagcagcacttcttccaaaccagggcaaagagtggaggactcttcatgtgcccttacccagatcagagaccaatgttctgtgacactgcagacgagagagtttgtacctgacaagtggtcacaactatgactaccagtcacttcttcagctgggactttgaagccagaggagccacacatgcacgcaccatgtacatcacactctttctgcttggactgaatgccttttatctgagagcttggcatgggcagggtggaatgcttgctaatatataattagctgacttggagacaggatctaaaggcaaaaacaaattggaggatactctatacacatacagagtagacatttatgtattgcttttaggcaaatgcttttgaagtctaaccagccatgtgagttcaggcctgggatgtttctgtctgtgatatctcagtgctcagatttttattttggatgggttgggacttcagattttcagattagagatcctaaccccccaccccaccccagctgtgtagaaagtaatgttttaagggattattttatgcaattttgagggccagccaggtgaaatgtgtggccaggctggcaggctggaaactcctgcagggtctcatttcagtctgagggagtgatctctttggaaaacaccagtcttgctgctaaggtctgtaactgattaggcaaagtccattgtccttgctgtgttgggtaatggcgtgcaatattcaaaacctactgatttcaatgtttatcccatccaaagtcacctccaaagtaacatctaggtgagtattctactaatcacaaggctccttaaccaggccaagtagcacgtaaaattaaccatcgcacatgctagtaatttccgtttaccaaacagaactatgtaacttctacaaagccaccatttccatcttttatgggagagtcagtcagaacaattgctctgttaaagcatcgggtcggggagaattgctgccttgtataaatctttggactgcttggttttgattcccctaacaagtagtttgagtaaaaaacaggagcctcactcactctgtgtcacttgattgaagatgaaacatctccaagcattctgccaaaaagttcaactgagaggccagttagggctatagttatatagctggccttcagacagtttccatgccccctagagtgggactagaacccccccacacacacacacaccagacaaggacacctggcctcttctttgcggtatgtctgtaggaactagtcagtctgggcctatgtccctagggctgtggccactaacaagaggcacctaatttaaatttggacaaatctccaagagctgcctgaagccacattatctctgataaatttattatttgagacacatatcccagcaattcaaaaggtctctcctctctctaattggaagatgcaaacagagattgttgtagcttaaatgcataattagttttccattcttctagttggcaaaccacctctctttcctgctgatacaggccctgtggccctggagaaatgtttccctgcctgctcttctctgaaagtagagttgagtaaagatggtgacccttttacaatagaagcccctccctccctttccattcccccctcttcccttactcttcccttttcttttcatcccccttccctgaaccaagtcataggttttattgtactgtattagttatccttttctattgaaaaagtgaggaagaaagagaggaagaaagaaagaaagaaagaaagaaagaaagaaagaaagagagagagagggagggagagagagggagggggaagaaatacaaaaaagaaaaagaagagaaggaaagggaggaaaaaagaaaaagagaaatcttactaattatctgccttcctatttcaaaagaaaattctttggctgtttattttaaattacctttaattttccatatccatcaattacatcacacctttattttaaatcttccatccccatcactattctaactttatcttccttttccattagcttctttcttttttttattctttaatttttcccccaagtctggaccaatatggagtagcttcccttggaaatcccctgataattttgtttgcacaaagatgaagttctccaccttgcaagcatctgtggaatgctgtctcctctgcctcctggagtagagataggcaccacacctcctgaaactctgagttaatggtttcatcaattaaatcagaaacaccctggttctttgagtagatcacagctcttctcaggcaacattgctcctttgcaacggatgtaccagggaattatttctcatcactatgattatttattattttctatacgcaaattgaatatcctgtgataagctccaaaaccgggaattagagagtgacttttaccaaaacaaccaggtggcagcagcagtatcagcagttatggctcaaggaaactcccctgagaaatgatgtggcattcacccagactctacgatggacaagggtcttgtcaaagaaaacacaaaggtacctctgccctcaagacacacttttcagggatgctaacacacaaatcactggaaacttttgatagagagcagaaatctgaggcctgagtgtgtagagctgtgctctctgagggcatctccaggcttttccttgagctacaggtatcaccacctcactaccacggtcctaccttccttggctgtagtcggactttctttgaaccattcactgccaaataatgacatggagacttcttgttatttatgaaagcttgacctagtttaggcttcttcccaactagttcttaaaacttaaattaacctgtttataataatctatgttcttccacatggcctgttacctctcctccacactgtatgtctgactagtgatcccacctctcttcttcccagagttcctatctctgcctggaagtcccacctatcctgcctagctattggccattccgttctttattaaaccaatcagaaggtgccttggcaagacacatcttcccggcctacaaaaagattatctcagaacaggcaggcagctgtacgtctccaccccttgcctctgtcatcaacggactccacaaactctcattgtgtatgtctgtctgtccctgtgtctttctccaattattaggggagcctcagtcatctgacaccaagggtcagcaattgtatttccatctacgttcacaaactaaggttcagggaatgacgtggatttgggagacaacactcaaaccactgctggtttctcttgggaaagagatagaaatcaacctcttagttgtatttcttattagaccggaggtttgtggatagctaagattgctctatacaagtggaagaggctttgggagtcagttctgattgagcggggtgagcagggctagcctttcttaacgctcaacagttatctgcctcatatttcttctggctaggaccataaggccaggaacaggatggcgatcaataaaacctggattcgacaagagtgagctttctaaccacatgctcaaccctgtagtcttccatcccgtgatccataaatatctgaaaatggaaatgttcttgcccaagtttagtatctgtccttatttgttataaaaagctgggttggactgacattggctcccttataatgtagagatttgcatgcttctgcacagaaatcctgtttgatatagtggtacaatccagaacctacttcaagttttatattacatactatgtacgtatcatattactttttatagttccaaagcaattggaatatgaattcacaggtgtatctggctctactggttttgaataaacaagttggctatattccttcaattattttttctttttctttttttattaaatcaagcagaagagctgccaccagcagctgtttgttcctctagtccagtggccctcagacaggtctgaacattgaaataattcagggagctttttaaaatctgaatgactaggctttagccaccaaatggtttaatctgaaccacaagggggagggcatcatttatgagatcagcagccaatcccaggggtgacccaagcttggaaataactattctggttatgtcctggtgacagtctgtcccttctggtgaagccggtcagtaatccattccagctattaggtagcacgttagttactttgttacaacaaaataccagacacaaagcaatttagggaagagggagtttatttagcaatccatcacgtggcagatgcacgggagtcatggcaaggagatgcttgggacaactggttgcatggatctgcatttaggaggcagagagatgcgctggtgccagtgccactgtgtctttttattcactctgggaccctacccccaccccccacccctctcatgaaatggagccattcacatttagagtgggtctctacactctgactaacttgatctagatattcctttatagatgtgttagagagtctaacctagttgggtgaaagacccaagctaacatggggttagctcgttaaattacaataaagcctcgtgcagtttgcagcaagctcaaaaaaaaaaaaaatagacaatctctcaaaggtgtatctaaaggctttctcctggtgattgttgagccagtctgtctgacaatggatattaactaccacaggtaactagttagatgatagcagccttggatgtcattgtctccacagtcagcagcttttgaaatcaggaaatgaaacttgaggactctggttatattggtcaagagaatgggttctgagtcttatctctggccctgggtagagacatgacattctgggcttcccagaaactcatgtgattccaattccaagtggcctgtcagtaatctggacagagattttgtaaataatttaaacttgtcttaaaatttagatttgtaccatcaccctctttcctgttgtccacacttgagagtgcgacatctgcaactttgtgatagattcttctgccctacactctgtgagccttgtctggattcttttcacagagatcaggagggatcaggaagtcgaggaaactgagcaagatcctagaaacatagccacctcccactgacagatctagatagtaactgacttaccaggagagtgaacagaaacaaatcataactagttctgataaaaaaagaaatccccaaagctatagactgatgcctctcaaaaagatctattgtgacttccagaactgcagaacaaggccatgatagaagaagggttattatgtgtgtaactagtaaagatggaaaaaaaaatactgggttagttgtttcctttaggttaatatttctaatatctttataatcagaggagaatataatatgaagacaacgggatccacagaaatgggatccaccatgtgtcaagagatgtagacactggagcaatgtagttaaacacacagacacacacacactcaggcacacacataggtttctagaaaatgacaatatctaaaaagaggcaagtgtggcattttccttgcagctttcagagacagtatggccccaatgactactgatttctttaacttccttgtttctgaaactgtgagagacaatgtctaatgctttaacccaaccagtgtgctgtcctgtgatgtgggagctggctatacaccttgtacctgagaaggaacttggggctgtgcttagaaagttgctagaccccatagatctaccatgacacatggacattagaccccatagatctaccatgacacatggacattagaccccatagatctaccatgacacatggacatctgagcattgcaattgccaccaaacctgcctctggccttccctgagcatcctgctccttgtcattgccattgacagaattcaaatgagacacagaagagtgctgtttattgcagagtaacgtgagacattctcaagggtaagagtgaaagatgcccaaaggcacctctgtctgggtctacagctcaagcaggttttacactaattccaaagcctctggaacacgtggctttttggaggtgtatttttctgtccagataactgacgtggtcatttaaattgactgactcctagggagggaacaatgtgtgttcctgttctttaccagaaaaactgcagctagttaataatcatatgacattcagggaagttcagaaggtcatgtctccacccagagccagagataaagatgcagacccctctctcctgaccagccagccgaatcctgcagtttcaactcctggtttcacaaacttctgattgtgagggaggggtccatccggaggaactccatgcctgataatattgaattagctatctcatgcgaggaggaagcttcacagaggggccttcatggaaaggcaaaacagtagtaactaacatggttgaagacttaattcggtccaggcacccattgtctagactaatcagcttaatcccaaacaacctctggaagcaaatagcatttttgttctcatttgttaaaaaaggacactgagggtcctattgatcaagtaagttatttaaatcatttatccaatgacaagagggtgaccaaggatttgaattcagctgtagctgaccctttagccctgcttttaacattagcttgagagaaaggcttctggcaagtccagacatctcaggaagggaactttcccgagaattcagaggctctcttcggctggtcatgctgtgccagtgggagtcttggttctgatgtgacaagcacaggagtttggcatcccgcccttacagctgccaagaggaattaaacaaagtcactggaagcaaaggaaagacacgaactacaatgccagcagccacagcagcagcaggagggaggcccaattactactggtggaagtgtgaggaaaattaaagttggtgacggttcaaggctatgttgaaattccaaagcagtgggcttgcataaccacggaacatgggaatgaaggcactagctgatgttcacacgttgacttcaggactccattcagtctccctttgtctcagcaagtctctttccagtcatgcatcagccaacacagcagggaaaggagaaaggcagggtgagtggatgggcagaaagaacctgtgcacgtgtgtactctaaaaattcaagctcattagaaatgaaaatttaaaatgtataattttaaacaagtttcctgctttagttctgccatgtccatgtttattaagtgaaaataaaacaaactgagcccgttactatgccccagccacttttttccaatacattttcttcaggcaaaaactgaaaaccaaatacacttttaccctcaacactaggtttgtggaacatttcttgatgtcacagataaagtaacagccaagactcctgacagtgtcatgcaatgagcatgatcatcatcgtagctttgaagaggaggccactgatgtctaaaagcagaataagtggcagagccagccaagctcctaagaggcagaaagaagacgtgattccaggatgtctgtctaacttggaagctggttctccaaggagaccacgatgtgtctccctcactccagtgcttagctgacactgccccacccacctcactgtccagggcctttcccccttagccttcagcacgtacctgcgagtgttttcagacgtgttagagactaactacaaagctttcttttcttcatattaaaaattgttcccgaatcccacaagtcagcccaggtttgccctccaaacacttggttatcataccttcttcggagtgatgacacttccagaaggcaatgccaccccaacacagtacacaaatggtgaattctagctcatcttatctgcactgcagtagcagacatctagctgcactttaccaaactgtgctacagtgacacaaaagtttctgtctgtgccttctcactggatctcatccagtttctgcaagcaatgcataggaaagaaatgatcattgcttattcttatatcctcatcacatcccacgtgtgggtaggtccctaggagaactgcaaacagagaaagcatattctacacttcatctgtcaggactcaggcaaaaggctagaaggataaatctagcaaaattccccttagctaacataaatcttaaaatatacattttgtagtgacaacagtgtggaggaaagtgtatctagaaaacttaggaaaatttcagtctaagtaaacaacattttcgatttttgttaactcactaaactttctgatcaattcagaaggatggtagcgaggagtttggggtcacaaaaactaagaaatcttcaccagattctgtttcacagactccctgcctgggaagactgaagacagtatttctcgacccctgacagctaagtggagtcatctgatgatatctgcctaataacctgtgattagaagtgattcatcacttctgggacaaggccatgagaagaaaatccagtgtctcctcttctacctcattggtcaaagggtatcctcaatggtcagtagaaacataaaaccaaatcattgctgagccacaagtgagcccagcattgagactcacctgaaccttggcaagcaatgccattcaaagccatccaccaggaagaaggaaccttcactgagaaaatgcccccactggattgacctgcgttgagttttcatagttcatgatggacatcagtgggcctctttactgctacagacctgggctggtggtcctgggctctataagaaagcaggctaaggagccatgtgagcaagccagtaagcagcacccctccatggcctctgcatcagatcttgtctccaggttcctgccctggctttcctcagcgatagacttagaagacagggtaaaataaaggttttcttccccaagttgcctttggttatagtgttttatcacagcaatagaaatcccaaacaagaaaatccatattcatttcttcctagtgttgatttctctcccatattttcaaggcctggttacttttatttgactttaggcaactctatattttgttcattgtttaaatactacctgcaggagagagggttagtctaaaggagttatgtggccattgtgagaagaccgcacccacatgattcagaagtaaactttgtgtggtctatcctggtctatccctggaagtgatctgttactaccatatggtacaggctttctaggtgccaatagacagatgtttgattgacaacgtatccagtctgttctggaagcagaggtgtttaaacgtattcataaccataatgtcagttttgttggccttcataaatgttccatattaaggtactgatacctcaaaacaaattttttgtcagctaggatacatttcaggaaaaaacattctctgaaaagcgtgattattttatcacaggtttcttctccaccaggacagtaccacacctcattgtccactaagatcttgagacaatattcttcctcaccacggaaattattccagatattttgcatttcctctaactttgtttttaaatttttcacatccaagacagttaaaacgagaattttctcacattttaagatgttgttgagtgctttttcctcccttttatataatctgtttaataatcaagtggtttcttccacttgacaccacagaacaggacacaaatgaagtagcttttagtttttgatactaacattcactgaaaatcacccaggccctcccacctacaaactcttcattttattcttatatttggaagtgactggtgagctgacctgtggctcaagtattcaaacctttacaagataaaatgcaaagtctaacatcccatgaagctgtcaaaatggagttaggaactttcacttagagtgcacttcccaagagaaattaggggctttagtgactgaccatatttttctcttgcattcagagcttcatttcttaattatatataaaattttgtcagtgttagggattgaaacgagcacaatgcacatgccaggaaggtgctccaccactaagctacatccccagctctcttcttccttattttttaaggattgcagacctacaccccgcccctcagcagcctctatttttctttaaggaaggcttggaaatctgttaactcaatgattcttcttttgtaaatgccttctactttaagggcagggaagtcctgttcctcttagcccagctctctaatttttttcacctacccaaagttttctgttatttacccctagctgtcccaccatctttggcagattgtcctttctcctccggtggctcgctattggaagacataggcattacaggtccttctagttggagaagaagaggctagaaaagaaatctattctgccctcaagctatgggatcagtaagataacaattttccctcttcctagtttaattaattattctttgagagttatgcaagagtgtgtatggtctcataatctcagcagtatgtgttcaaacttgatagaagaaaggaagagaaaaacaaaaacagaaacaaacaaccaaacattccaacccatacacactagatactgcaaccaacacagtgtcggggaaacagcctaacagaaatccaggagtatcaactagttacttttcgagaaaacacccactgactctacttaagaagaaaaggtttggggggctcacattttgagagctcagaccatcctgtgtggcagcagaagtccacggcagctggctacattacatacagagtgcagaagcagagagcccaacattaatacacacaggccactctctccatttattccttctcaagacgtggtatacagcagttccctctgaactgaaacaaccctgggagagagcagggaagttcctgagacttgggagataaaggaatgtcacacacatcctagaaagctgaaacttgcaagattcacaaggcacctcctcggttctatagaagagaaaacaaattcaagatgaggctgagcagtagagcagaggaggggccatttctcagacctgctgagcagcctggtctgcaagcccttgggagatccaggcatgaaactgtcttgagtcatcgcccatgctggtgttacagccattttccagtcatccctgttcctgtaagtgacccctgacccacagtcctgagagtaaccccaggggaaactcactggctcaccaggctggactttgtgacttctcatccaggattgaggagacgtgtacattgcttctctgcaggagatatcccccacacaaaagaccctagtcctgggatactataacccacattcagcacttaattctttatttatatatagctcttactggaaggaacacacttctagcctagatttttttgtaccttatcaaaaagcttaaggagagagttatgttgctctatgttagcaaaaataattctgtcacctatctgggaagaaaacaaaacaacaacaaaaaccttccagtctgctctctgaggagcccagaacacaaatgtgacaagatgaaatattcaaggatgtgactactaagtgcaatcctgtccttgggcttgtcagagggtatgagcattctactgaggaccaagagagggtccttcctccctgttgatggcagggaccctcattttactgcaacttccgcaaacagctcagatttacacctccaggtcttaaagataataggagtttgtggggtactttcagtgacaagctggtgccaagagcaggccacatttaaaaatcaagaaaaagcataaaaagaacatgttaaatacttagtattttagggacccctttaacacctggtaatatctctaatgataatgatcttggagtcccatttattctcttctccattgacataaaaaagccatagattattggaatggtaactaaaattcaactagaatttacccatgaaccagttcaaagagaagaacttggttttgtttccacaatttgaatatagtttctatgggacagaattcaccctaacgtttccagtctctactgcagtgctgagcacacaatgaagactaaataagtatttgttggctaaattaacttgctcccatattacaatcacctcattgttagcagccttggtggaagacatcccctcagaagcaagctcatggctgcgtgacaagcactggtttagggtatacacacggtacatggcagcttgtagaagagacactccctccagaagtactctcaacagttccctaacaagtgctatacaaagcaaccttaatcctggtgtgttctagaaagatctgcaccttcatgttggctaacctttaagtattgtcatcagactctgcaagagtatttgttttgtttggttactatgctcagtcctggctgcatccatctacccttgcctaaatcacaacagaacccacataacaaagctaacctgagctctaggctgcaaaccctccctggggctccatgttcacccaggtagtgcttggaatctaaagtgcccccgtgggctcatgttggaatacttgatctccagctggggggcactgcttcaaaagttgtggagctttaggtatagggccctagttggcagagtgggtcttacctaccaccggttataatcctgcatgctgtgtaccctggtaagtttccatgtaaggtgtctttatcataggcttccaaaagcatgcctcctgggcatggtgcactgaaagttcactgaaaccgtgagccaatataaacccttcctttcttgccttgctctgcctgctctttggttcaggtagtcagtgtaagctatgaagatgagtctcagcttaggtgtggggaaatcaagagtggtccactctgaatctctagtatagtattaaagcacatgtctggaacattacaatgtttaaattggcagtttgaatctgagaatgaatgaagtttgatgtagaaaaacaagtcgagttcataaagtaaattttgtaaagtgcaggtaagagcctttgaagggaggtgtcatatccagttagtgtcaggttttaatgtgacaggtctggagtaaagactgactgccacagataaaaaaggaaaggctggccacctaaattccatgggccatcagtactgatcactagggtaaaacgtcttattgaatgtattgacttagatgtccatcctctctaatacatggtgggctccttaagacttagaaatgagggcatgtagtcatctttcctggataagtgtagctcccacctcccatcaaagaagcctctctttacagcagatggagaccctcacagagaaacacaactggacacaatacagtcttcaacccatagtggggagccttccccagggggcacatctacattatagctcctgcatcttcagctgagggaataccaagagggaaggtacagaaagattgtaagggccagaacaccaggaaatctgctgtaaaacaatctcccttgaaaatgattgcataaaccaaattggagcagtggtagtatcaatgaatatattaacttttaaggtggaaaaccttatggagtcccgtccctagacaaagaacttcagacaactatcgagtgctgggaaaagtattggcctttcccagggaacagtcctcttctggtattccaaagcacagtggtcaaccctgagactatatacgcatgacgtcaaaaaaatgggacgataatagtgaaaaaaagaggcttttatcttgagagtggggaagtgggagggttttctgggtgagggtagctgggatgggctgggatgagggaagtgatgcaactctatttccattaaaaacattttaaaaatgaaaaaatagaagcatttccagttcccaacacccagtatagtaaaataccatgagccacaattcaagtttaacaaatgctatcaaacaattaacggtggaccaacaattaaaatgattgaacattttgaaaacatgaacagtttctcacacacacacacacacacaaaacagttttctgggtgagtttttcatccatagctccaaaacactcaagcttctgcttgagtggccatgttggcatggtatagagagtgatggcttcacccacaccctatgccttagagcagcatggaattcttgcctgaacattccctagcctgtccattctggtggtgagatgtgaacttcagtatcaagtagtggccagtctaccttgtctgagcagaacaataagaaagaaagtttttagatgccaactgtgaaacatggttggcttttttatatggagtttcaactggatgtcaagagctattgtgccagaattagatctacgtaagaattaaaaagaggaggaagaggaagatggagagagggaggaggatgagaaggaagaggaggagagagagggaagaagaggatgaggaggagagagaggtggaggaagagcaggaccacagctatggcagaaactacattttcacaggttagcaagaaagcaaaacttttttcatgcttgcctcaaatttgcagcatagccaaaggcacagtttttgtgcagtgaagaacagtggtgggctgaggtggcagggtagcaagccttggtaaggatagttacgaagtggtgtgggttgggggccagttggctgcagagccattcatcagcgtgccctccccttactttccatgtctgcttctttccctttgattggaacgcataaccccccccccacacacacacacacatttatagttcgctgctgacagcctccctggaacaagctttgctttttaatttcacaatgcacatctaagtctatggtgtgcccataaagacgttcccagatagtgcctataaaaggcagttttcaggagtcaagacaagaatgcagtacccaccacgtggggcttggtaactctcagctatttattagtgagtgccttggtgccctaccatctccaccagaagctcaaacccaatgaagtacacatctccaggttctgacaaccatataatctcagggcttttattttcttctctttctttttctcttttctttccttttccttttttttttgagaaaaacaggactgtcattgatttttgttttcctttctggctcactgggtactctgtatgccttcatacaccagctgtgaccccaagacacagtcattcccattttcccatcatcgccgtaccccgggactctgtgacatttgctacactaagcaatgaaggcttatgagggattttaggagaaagagaaattcttaatcttgctttcataactctgggcctaacagttggtttaaatttccaaacaatccctttcaaaaaggatagtatcaaaacacatgcaaaaaataaaagcctaaacaaagcacaataaattatttcattgccgaggtattagatttcaaagggagaagagagcacacacaaggatattacagcggactatattggatctttgggaattgctgtcagatattgataaaacagaaagactgtaggagatcagataaaagagaaatgattgtatttgaaggaatgatgtgagctgcacggccagcagagatttaaagggttagctaataacaacccacagaagagcagagctggatcaggtcccccgtgttaaccacattacaacctttcagcatctgtacaattttttttcatagcatttttcctcatttcagaatttgcaaactatgaatttaataggtttagcatgtcagtcagtaatttcatgcccaggcagtttagaaaaaagtggagtagggttttaggcacattgtccctctgttcctaccctagccaaactcaatcatgctaattcacagcccagagacactataaacaatgatgccctctgcacttcaggaactatgctggagagaaaacacactcttgtgtttccttctttgctcccccgccttttcttaaatccctttatcccaaagagacagcatgtatgtattgccaggctgcctgctgccttccttattcaacagtcacccaacagaataggacaggagaaatttctgaaagggacatggcaagccacaatcaaagatcactcaaagtgaagcaaaaaaatctgagaatcaaattaataatctaaaagccagctgtgacagtagccaggaagttgagcagctttggccaggtctccaccaaggggggctgagcacacctggtcctgaaagacccctttgtgacatgattttatgaagataaactgaaatagtcccagcaacagtagaagtagtttggtttatttcagtcaggcagatgccatttggtgaacttcactccaggggctgaagttgccccagttgcagtctgtcctttgttcctagccctagttgtcagcacttaccctagtaaagcaattaaaacttaaaaaaaaaaggaaagaaaagaaaaagaagaagaaaggatggtagatgtcagcagcatgctagaggggtgtcagttaattaatagtgcacatcctgaccgtttcctatcttaggatctactgcaacagacaggagcttccagttggggcatgagcgtcttaattagcagctgattgtgttctttaattggaacccttttctatttttttgtgggcaatatcaatttaaaaggtaactcctaggtggaaactatctcccaactaccgaagcccgccaccacttatgatcactacagtggtgtgatgtgccatctttatttggtatggtataaacagagttcagaacacttctccacacagctcattacatttgacatctgtagtagccctgtgtttactctgtgtgtatgtggtctgtcttctaagagctttaggacacacccaggtcctcacagttgggctacaaaaacaatgaaacacatacagccgaacagcattttcttcttactggtaatggattaggaagggtgctaatcttcttaatttactttgtcatataagtaagttctcgtgaattctttgaaactagaaagaatagcggactgtagtcatgaatttttagggaattcaagtctgttggcatttgtcaacaaatatccctgggacagatttttgaattagtttcaatcttgattacagtctacacaatgaacaaaacatatttccacacaatggcaaagcttacttgaaaataatactgttttagtttgaaaataaaaaaaatatttctctacaaaagtcagccccttggtgttacaaaggggaacaaatagtactacagaggattagcttcttttgtggaacaagtgatattttcatttgggaggggttaggtgccatgagagcaggggtatgagtaagatgacccttgagttcaagtgtcttgctgtccaacggtggtttcatgttatatctccctgggtgttttcttcctggtatctcctattgtatttcaatcctaagggcttgaacaatatagcagtgtgtttcagtaaaggtgttctgaggtcagacaactcggccttcactcctcaaccaatcctttggtatctgtgtgactctgctaagccatccaaccttcctaagtcttggtttatttatttatataaaatcatagcactatttcttccatcattataattttggccaaactgaggtagtatgaattgccaatgatataacactgatggtttatttaatattataatggaaacatttttataactgattttctttggcctttaataacctaggaaaatttataaagccctatcagtgtgaagctccctttcctcctgttggacatagccctcatccccctgcacaggagaaacagtgctcatgacctccctctcccagtcaatacatcattatgattctttcaaatagcaagtctagccttctctttcttctgcagacatcccccttttccaatctattttgtgtctttgtagactgtctccttattttgtttttactttaatggcaggtcctcaagttcaagttttgttatgaaactgtttttgttgtaagtcaaattacaaagaaacgcactatttgtagctttctcctcattaaatgtatcacaaagcaatacaaaacagagggctaattaagcatgcccatgcgctgcatctgtgaagaagaccctatgaattatagattgacttaacaaagttggcttttggctctcagaagaaggagaaaatcacaacacccctgatggttatgcctgaagaacctggtgcgatggagatgtgtccactcataagaaaatgttcaagtgggcatctctccttggtttctcatgagtacattatctggattggttcacagccatgatgtaatggatgaaagagttccattttcaaaagctcaaagataacagctatctattattgcacaacataaaaactattcccaaattcaatggcgtctctccgggatggattcaactgggaagctgtactgcttgtattatgtggggtctgctataaagtctccctcatcctgaagcttgattcagtggagctttccaggctgctgtggctccatcgatatcactactgtttcatggtcactgtcatcaagacagtatttctccagcaggatggagcctgggttcctagagttaagttaagttaagaacagagttacaaagtctctttgacttaaggtcacacagtatcactcatgctgccctgtcagtgaaagttaccaacatggtaattccagtgcccaaaaagcctttgtaaaaacaagtcaggtcatgttcatttctatctaaagataccttgtggggtcttagttagggattctattgctacaatgaaaaccaccatgaccaaaaggcaaggtggggagcaaaggatttatttggcttatacttcagaattgctgttcatcatggaaggaagtcagaacaggaactcagacagggcaggatcctggaaacaggagctgatgcagaggccatagaggggagctctcactggcttgctttctgtggcttgcttagcccaccttcttataaaacccaggaccagtatcccagggatggcaccacccaccaggggctgaaccttcccccactgatcattaaatgagagaatgccttacagctggatctcaaggatgcatttccacagctgaggctccttcttctgatgactctagtttgtgtcaagtcgacacacaaaaccagccagcacagacatgtgctgcttgggctctgtttcctaatgttcttgaatagaagatggtagaagaagaacccagtggaaacacagtttaaatccggaatccctgaagtttcaaaagctcatgcctttccctgttagtgctcacacataccccactctccctgtcccccagcttgtgaatcaggatgcaagctcgtagctactgctccagtaccatgtctgcctgcagccatgctcccctccatgatggtcatgtattcaccctctgaaactgtaagctcccaagctgtcttctataatttgccttggttctggtgtttcctcatagtgatagaaaagtacctaagacagtttccatagcctgtgacacacagaataaggtcttgaaaaaacattaagaaacagagcccaagcagctaggaacagattacagttgcatattgattgattgattctgggtacagacctatttttctcttgtaggaactttaaaaaaatcctaattaataatttttcctagcccaatcacaattcccctccctcccctctcctctcagtttctcccctcagcctccctcccccatccactacttctaagaacttttaaataaatacactggaaaagattactgtgtgtgcatagtaattgtgcaaataacttagtcttctctctaatagaaaattcattataatgggtttttaaaaattccttactccccaagagggagtgaggacagaagacaagctccctattaggtttgccccaaagtcatcccagcgacaggcaccaaaattctttgtatcaagttcaaagtcatatcttactgttgattgcaaagagatgtcagtgagctactatttaggacaatagtcacacttctgtaactgcagttctagggggccccagcaccctcacacagaaatagaagcaacaatgcaaaacaacaatgcacatacaaataagctattagaagtttaggtagttagttttcatctattcaaaggttgtgatgtggaatcaagtaaaacaaacaaacaaacaaaaaaataaaaacaaaaacaaaaaccccacagctcttcatttttggactctaccaggcaagaccaatacatttctgccgatgaccttgccttattctgagttgggagcttttagaatctgcatggataaatcatcacttaagtattgtttaaatatgtttctccttttaattcaatttcctgttttgttttctagaaaccataaattgtctgttaagattttttgcaaaatgcatattgctgtccccagagacctgcgctgctcttgagctgggcacttcctgccaagtgacatttttaaaacatttccttttattggttttgcataatggttgcagcaattctcaagtaataagaaaagaatgagcaatgtgatgtcctctccagcacacagccacagagttagtgctaagacaaagcaacccacaacaaaacagcaacccacccaaaacgtggccttggtcacacggccctcctcccagctccttgtaagatttgaatttgagatgtttcttatctcttctagtgaaaaggggactgtgtgctcagggaaattctattgtgtaggacatctgtgatgacattcttgtggtctgggttggacccaagctccatcactgactactttaggattcactggggatgtgacttaacctcatttcaaagcaaaaaccaaggagcccagttctttggatgatttttaaggttaaataaggcctctgagagtgccttaaatatgaatttgcatacgttccagggagaaaactgccattttctggccccagggtatagctggcagatgaagcctggaaacactgcattgggaagggacagtgatgaaacagtggcctactgatatggaaagtattttccaaacagggagtctcctacttgaaaacatttgtgcctaaaactgaaccttagctcagtctgcgtctacagcagcacataacaggcactaattactgtctgttgacttgtttatggcccacacatgaaatattatgcacagtagcctatagtaggagtaatgaattatagcctgtggagccaaatctggcccaggacctgtatttgtaaataaagctttattgacaagccatgcctatttatttaaatatgtcttcatatacttttgcgttgcaaagaaaaatactgtattgtcaacagaaatctctcatgacctgcaaagccaaaaataaccattatccaactttggcccttcacagagattatgttggtgttttccccaaacattgcctataaaatgaaattagccatttcctccttccttcatagagtgtttcctggggaaacccttgatccagaagcaggtacatatttctttcagggttatgatgtaattgtatcattcctgcaaggaaattactgagttagtgctgccactatgacgttcaccatcactggggtcaaatctcctacagaaccaacttaagtgaggggagattgacttctgctcccagtttaatacattcagttcctatttgctcatccctgagtgcttgggtgaaatgtgatggtggcagcagggtgtggccgaggaagacactgtactccaggacaaatgagggaaaaggtagagaggggctaaggacaaggaacatctgactcatgtggttaattgtgtccaagtgttcaccactccttaaggtttccaaaacttccaaaatggtgccacctggaaaccaatattcaagttgggaaactacatattcacaccacacacacacacacacacacacacacacacacacacacacacacacacacgtttcctgcccccccccaaacacacatataaaaggagaggctagtttcagtttttaaaagaagaaaaaacaacacaagaaatgatcatatgaacagagacacctttctatctacagtgggcatcttgaaaacttacaataaatgatagtgtaatggagaagatggctgaagactctttgttgactttccatgtagtggcacctccaatttcccccagggttgtgactaagcagcattcattcatttgttttcctttccagcgtttccctgggaaggagacagaaaatgtcactctttgctgtgacaaagagatggtttcatggtttgttagtgtctatgactgcaacaaagacccgagttagccaacttacatggaggaaacatttaatctgcaagacttagaagtgtctgagactttgatcctatacttctggacttgtgctgagaccccagtgtcatgggtcatggtgccaagcctggtgcagcaaacacatgactagggagtaaaagagagaaggaaggtagtgaggttctcctgtctcctttaaatgcccatctcctgacccaagcttccctaccgtgtctcacctctcccgagttccaccatttcccaaggaaatatccaccggactggattatgtttaagatgcaaacgagcacatacggttggaggtgacctgcttgaagaagtagcctttgctcctctcatctttctatggcattgctcactcctctgtttttgcacagcattgtggacctgttccccaaattttccacagtcactctgggtgctgatgcaactgtgtagctgtgcttttctgacactgaaggggaaccagagctctcccctggcagctattcacactgcacttactgcaccaaggaaaccatgctagcggggtttttgattatctctacaaacccacttggacccatttctctctctatgatctaccatcaaactttggagcaaaggaagagtcagtcctggcatatagaaaccactgtacttaaagctataagtttgcttatttattccaagcaagaagccacacaaacagaaaatcagctgtctcaggaagtgagatttgagttctcttctgatcataaggtccctcctgatggtcaatgccagaggtcgtacctctgaattttgatgactttccaaactttgcatacccaggagcgcttcccacaatggaagactgcaagatggaaccccacagcaatcccccacacacacaaagttccagatgaaatgactcaaaggccaagtctgtgtggtacactcctctgtaattgctgggtctcttccagaaggctctcaacacttgaagctccagtgaagttgagcatgtggaaagggctgaagcctgtgtttgtcatgttcatcatggaaacacagcagcagaacatagccagcatctgaatctgtgctgtcataaaaaccatgtttctctaaacagagagcaggatgctaagaggtgggtgggagtcaggggttccacgggaagctccctccaggaggcagatcctcctaaagagaacccgctcccacctaggtgtgtactgtgatgtacaaatgtagtttttgcacacgatagtctcagaacaagcctctgacatgggcaagccaaacattctttgtctccttgtacacatgacataaccagagcagaaaaggcagctgccattctcaacgttcagatgcaccacagccagagtcagagctaatgttttttggacctacctaatattctattgaattagcacctgactgctcttgctttgagattgtctaatttgaaatgggtagggccattgagatgactcatgaagtaaagggacttgccaccatgcctgaggaactgaattccacccctaggacccacatggtggaaggagagaaacaacccccacagttgtcccttgaccttcacacacacatggtgacacacttggtggtacacacacacacacatatatacatgcagacaaacaaataagtgtaatgaaattaagtaaatgaataaaccgtgcatgaaggcgatttcaaactcactgatgggtatgtactgaagaaagcgaactgcgatgacaaccaccagccggtgcttacaacgctgtgagttgtttaaaggaacccactggcagctaggcaggcatcaaggagtagaagaacaagaacgaaagcgaggccaagactgaggctgcttaatctgaggcacgggtagggctcttatgctgatgcgtgctggtgtgtgtgtgtgtgtgtgtgtgtgtgtgtgtgtgtggtatgtacataaacacatgtacacacttgtgcaaacacatgtatacatgaacatgtgcacacacacacacacacacacacatctccacacatgaatactcatacatggggatgcacacacatacatgtacacacacacacacacacacacacacacacacacacacacacacacaggaaccttagcaccaataaggcaagacaattcttctctttgttccttgcacctatgttgattacatgaacataatattcggctgcctgatccaggtggtctgttgccctgtagttctgtgcctggcctacctgactccatgttcagacaatctcactggcccaaccaaaaactgtaatgttatagaccatcttgttttcaagtacttttgatggtatggtcatgaaaagcagaggccatcaggatgctaaggcttaagtataagccaggtattggaggatcttatcctaaaggaggggtgcttagcagctggagcctgtttccaggtttcccctccaggctgagagcatccttccacagatctgcgtgatgactgcagtgctctaggcacctccattagagaatatgtctcctggcactatgtttcggtgaatgcagagacttggattcatttttttaaaattaagcctcacacacgagaatagaactagtatgcaacagagaaagggttccagagcatgaaggtaaacccccacaggagagcattcaggtacgagaggagtaagagttaaaattctctcctattaaaaccctgtaaataataaaccagggatgaaatatttgaaacatacatggaagacaaagggttactgttcttaagacataaaaatgttcttttaaattaacaggaaaaagaggagtgttttcatgaagaaaacatgcgcacgcctgcatgttgataggagtttacatcaccagcatcacacaatgacttccatttttggctatcacactggcgaaggctaacaccaaaatgaattccccatgatggtaagattcagagaggtcaggcacccctgtgccctgctgactccacagtgcacggttctgcattgcagacaggacagggctggggaaagcaggaccagctccctgggactttggttctacagggagagcactacaagcgagacagacacaaaatagtgtgtgctctgagagaatctcaagggcagaacacacacacaccctattcctgtgacatggtctgcagatgcagtggtctaatctggcatccttgtgtccaacaagccctgtgtgcagaggaggacttcctgtgtgtgcctaggagctgggaagatggcccattcagtgaagggctgaccaccacgaggaactgtgtttgatccaggacctacacaaaaatctgggtgcttacaatggaactgtgaggggtggcagagaaaagaggctgcccagggcttgctggctaggcagtctaggcaaatcagtgagctccagggtcaatgagagactctatttcaaaatataaagtggagacctgatgctgacctctaccctccttatgcatatgcaaacatgtgtctgtgtacacacacacacacacacacacacactcacacacacacatacacacacacacactcacacactcactctcacacacacacactcacacatacacacacatacacacacacacactcacacatacacacacacacactcacacacacatacactctcatacacacacacactcacacatacacacacacatacacacactctcacaaacacacacacactcacacatacacacacacatacacacactctcacaaacacacatacactcactcacacacactcacatacatacacacactcacacacaaactcacacactcacacacacacacacatacattcacacacacacatacacccacacacacatacattcacacacatacactcacacacacatacactcacacacactcacacacaatacactcacatacatacactcactcacacacacatacactaacatacacatacaatcactcacacacacatacacatgcacacacacacacatcacatatactctcacatacacatacactcactcacacactcacacacatgcacatgcacaaacactctcacacacacacacacacacatactcttacacacacatacacttgcacatacacgcatacatacacacacactcacacacacactcacacgcacacacatacactcacacacacatacactcacacacactcacacacaatacactcacacacacatatactcactcacacacactcacacacatacactcactcacacacacatacactaacatacacatacactcacacacatatactaacatacacatacaatcactcacacacacatacacatgcacacacacacatcacatatactctcacacacacatacactcactcacacactcacacacatgcacatgcacacactcatacacacgcacgcacatatactcacacacacatacacttgcacatacacgcatacatacacacacactcacatacatgtacgcacacatacacaagagaaagataaaaaagaaagcactgcacaagagagctcggagcctgggtcaggaacaaaggggacatttctttttctgctttgcaactttaagaataaacaaagaaataaacaaagataaaacaagcccagcgtctggtaagaaagcatgtgtaatttacggtaaagtacgtcctggcgtattgaagcttgaaccctaagatcccacatcaaaatggcttttgtaaaagggctttcccagcgctatgctactatcaagcccttcatctcctgtgcgggggtgcgggggtggtgggtgggggtgggttgggggattttcctccctgcctgggtcttcaagcacttccagaaatgcttgggtagcaattaaatgttttccagaactctgtccttactcccagcttactagacagcattccctgggacagatacacgctgcaggaaatggctctgccaaatgcacaggaatagaatgtccctgtcggtccctggccagcgtccttcctttctcccgaaagcgcatcaagaaggaattgtggctctggtaactgtcaaacttgacctatgccatctgccagactgaggtggtgagaatgtttccttctgtgcggcttcattcattcctgtgaccgctgatgggacgccacccctctgctgtctccgcttaggatatgaagacaaagcatagagatgtggggaaattaaatcagactccaagcctgttgccctcgccatcagggttcacttcattcaacaagggtacctgagcaggcttccaggcttccagggcgtaagaaaggcaaccctttgctggaatacttttcagctgtttccatcaaaccaattccctgaaaagaaattgaagttccaagttttatgttcctcttagtactattttaaaatgagggagagcggcagagaccgacacacacacacacacacacacacacacacacacacacacacacacacacagagagagagagagagaagagagagagagagagagagagagagagagagagagagagggagggagggagattaagacactcaacaacagcctgaaactgagctgactgaagacttactggaagtcagttgtgttttgattctcacatgcagtagaatgtattttgttcagaatgtgttttaaatgaagaaaaaaaaagagttcagaaaatggtatgttgatcatatccatatagtttaactatgtttgtaatgaaaagacccagcccaatcattaaaatatcaattgcagttttttacatggcggatggtagaaatacaatttttttgccttctattatggaaatttctagaccctaatatttcaacaggaatatgtgaggaaatgacttaaaggattacgttttgggatctacagaacttgttttgcttctccatatgatgacaaaaatgagcaatcaggatgtttctcttcatagccatgagttaccaggaagcaattgttaaactgttactctcccctttcctccaatgtgcctttactctcttgctagaaaattactacctgactctagtagtccctgttgtttctattgaagaaacatgaaagaggggaattacatctctgagctggaagaaaacatccatattttagcgtttaaggaagttattcccaggtgcgctgtttcagtgcccaccctgttgtctccagtgagcttttctgctgctagacatatttttcaaaggattccaaaagctgaaaaccatccaaagcctcgctcctctcggctctttcatatcgaccactgagagttctttctggtgattctttccaaaatgatatggctgttctgcatcattcttaagaaagccacacccacccgtacttttaatgtttttaaattgcagaagcctctcctgctcgccatgagcaaggtacaagtaagcaagaagaagaagtcccagtctcctaagcctgtaccctcacagggcttacttgtggtcccatgagccatgctttcttgggccatgtttttctgtacttatctccccccccgccagtacacataagcatacaatgaacaaagcagggtcacatttcagtctcttctcttgttgctgtgtcaccctgataaaagtgacataagggagaaaaggggctacgtaggtcccacagttcatggcaccatgataggaacatcaaggcacaagagcttgaagcagctggtcatactacttcatagaagaggacagtgaacgcatgctgccactcacttccctgtccccacttttccagcccaccaccctacccatggaacggcaccacctatggtgggtggctctttccaccccttcgtgcaatcaagacaatcccctagtcatgcccggaggctcatctcccaaatgactctagattctgtcaaactgataactatctaaccaccaaggattacatctccatcacaggttaaattgtatatatgtatttctgttgcttagtcttcccatgaaataacacatgagatacactgtatccacaaatatccttcggatggtaaaatgcataaaatcatattcttactatttattccattgataaattcgaatggaaaaaaccttaaattgcttctaggtatcaccatcataaggaacactgtacaggacatccttggaggtaaatgagaataagatcttgcttcatctgctttgagtatattggagctacagtcctaatgttaagaaattgtcctgtatttccctgatggctaaggatgttgaacatttctttagtatttttccaccattgagattcctctattgtgaattctctgattagaacctcagcatctacatggcatctccttggactacctttctctatccctttttggatttcctgcctgactaactcccgcctgtctgtcctttggctaaagcagagaaccactaagagcaacatatattcacagcatacagaaggacatccccagttactccattgcccacctggggaaatccatctaaaagactctcatcctctcccagatccctcctatgctcaactctgctatatttttccacaagttattgctccctgagaagatacacgcttacttgttgctttctgccttcccactgaaggtaagtttcctaccacttggaagattgttttgttccactctgtatctcttgagccacaggtgtgttttctgacatatgtcagatgaatcattcccctgtacaaagtgcggagctggcatcctttgaaagattaggatctattgttttgataccttgatccagaaaatataaattttccatatgcacaattataagataaataagcatcaattactgtacgcccactacctgcctatgactgtgataagagctctgaggaatgggaaaaacatgagaggctcaagcatggagcaacggagatgatgtaagagcaatgtagttcattacatgcaggagacatctgtatttaaattcatatgaacagatggaactatacagcacaggaaaatcctcaggagaagaagactcagcaacaaagacaactgtagtgaggttctggtgtctgctccttgtttacgtaggtatgagtatttgattcaatgacagcattagataccatgattttagtggattataacataagacagtcatgttacagatcctgcagtcattcagggactcttgcatcttgagcctctcctcttctatgtgcctggtttcctctgtcatcagtaagcagatgggatgtggccgtgtgctgtatgtgcaccagacttggaattgctgtgcgtcactttgacttataatctattcctgagaatcagtcacatggggacttagaatgtaccgggaacctggagtccacactttagctgtgtgactagggagtatgggaacctggtaagtaacacagtcttcatccacaagcaggtagtcataatacttatttgggatatcaatccggagaaacacttaaccaaagagaaaatctcccttcatgtcaatacttagccaaagccattgattggtttgcttggttccataataaatgacatagaactgaatctatttgctttcatttttatggagatataactatgacaggtggtcaccatgcttccttacagttcagtcatgcgtgatgctgagccacgagctgttgtcaccactgttgggaatgtacatcctgtcatcaggtggtctatcagaagttccaaactgatccttcattttcactcaccatacttaacatagacaacatctttagaaaatcttttttattcatcatccttttatttatgttacatactaaccacagtttcctggggtgatattttgtttgtgatttaacaaataaagcttgcctgaagatcagagtgcagagctagccacgatagttagtcatagacgccaggcaatgaggcacacaactttaatccctagctgtctgttcaaagtcctggagctcccacagctcaggtcagctgtgtctgtgggtgtccccatgatgatcttgccccccccaccccttgctcttatatcccccctccctctcttcaaccaactcctggagctctgcccagtgcttggatgtggatctctgcatctgcttctatcaggtactggatgaagactctatgatgacaattacggttaaatgttcataaacagtgcattttataaacatgttccatgcatttgctatatttcaactgctctcacatacaaaagactaaatggttataaagataatgtgcatatcacataatttacaactcaaaacatgtgattaattaaaattaaaagccagattggcatttttgtttcttcacactgtcttatattttgatccaaatagcgtgaaaattcttttcattaatctcagcaagaatttactgggagtttccaattttataaataaacattcttagttccatactttaaaaattgatcttaattttttctgttccgatactattaacttcttgtctgggaaaaaaatccggactccttctatcagaggcctcttctctgctctccatgtcttctctgttttcctccatcactctctctcttttaaagtcctggaaggcttctgagactaaacctaagcatgcttctagtcagtgacagaaaatttcatcacaggagaagcaatgggaggaaatggcaggtgactgatgatagaatatatgtaatatttcgtgggagtacttcctcttccccgaagcataggtgtggaaggactgcgtgatacaggctggaagggtgtttgttttcaaaagtcgaacaagacatcaagtgtcattttttataaaaagaaagaatgtatttgaaggcttcccttatttgaaggtccagaaggatgttatggaggctgaagcatcatctaggaggggttttggccagacggtaacccatgtgatatacaaatgatgtcagaacccggcaaacggaaaagatccaagggcaaaagtgaagcctgtggcatctggcttagaagtctggattgatgctctttacacctattgaggataataaagaaactgagtatggtggcttgcagccataattctagcagttgcgaagctgaggcaggagtacttttttcaagtttgagagtagtgtggatgatacagagagttacagagcaacttgggctacagtgcgatactaaggagcaaaaacaaagaataacacaaaagagggaagagtgtattttttgtgagataattggttcaaaaccacactctcttgttagcacatctgtagggcatctggtcacagcagcatcatgaatttaaaacacaagtcttgaaccacgaagaaacatgaggacagggatggagatatgaagctgtcatcaatttatactcccaattataatacagtaaggtttttaatattctgatgccacacacaaagaaaatacacctaccctttagctgttttcttaaaactgaagtgactatgtatggctcaagggccaacaacacagaacaactatgacttgaaagcaagttcacctgttctgctctggattgccaaccccactccccaaagggatttactgttgccaatccattccataccattctgcatgctcactggcatatggagatatgtaaactctactaccatatttaattttcaataaacttcatacactgcataaacaaatgtgtactgttaatttttaaattgctataacatagtttcaaagaaaatgccttgttcatctgttcagtcatgcaataaatatttattgggtatctaccaggtcactggtcccttgggatgctgtggtgatctgacagaaagctaacattcctatgtggatgacgaatctcaaatggtaaccgtttatttagtgtccaactttgtgcttggttactgaatttttgtctgtttatcattattatcttaggatagatttctagaaatgcttttatttaaccaaacagtataaggatttttaagccttttagacaaaatgccaattactttccaaacatttatatgatttatatcccacacccaaaataacacatttcaacagaccctggcaaatattaccttcttcttcccttcagtcaagacataaaaaaaccaacccatgactctggttgtaaaatagaaagacatgggtttgacttagtaggacaaccaaaatggcgctctatgttttcaacctccaaacactggtgtctcatctttctgctgctcatcagcattttgaagaggtctgtctgctaagcacattggttctatgcaaagactttgtgatgagattcggtggataaaataatcaaaggaaataagagggaaaatgtctcaggcaaaattaagtcattctcatatctgtggaaaatggaaacctggttgcctcacacacactggtgctgattcattaatattaattggtatctcccaagcaagagagaaaagtgccttagatcctaatcgtacctcattatgataacagcagactgcatctaaccgactagtcagcttttcagttacagagtccactggcctatcatgaaaaaacacctagaaacagaaatggctcctaacagcaaaacagtagcactcaaaatcctgccttctccctttgtcctcacacagattgtcctgccaatctgtcaacctctccacgacattctatccaggaacatggaagaactgcccctctgcacgctgaagtgtagggttagacaggtggaggtaagggttacacaagtatgtgaactgagagaattcctttcttcttttaaaaaattagtgcatatttgtatcagaattttgaaatatataaaggaagtaggaaacaacttttcagaaatcttgctacagagatgggtcctctattgatgtgttccatttttttcccgtatgtacactatttaatactgaacacatggtacacagttttcgcatggttggataattgaaatggaacctttgagtcaacagatggaggttctccaatcacactacactgtccattcacgtgtgcctttcagccagttgttcagcctctctgagccttggtttcctcaccagcaaaactggtgactaaaaacagtctgtatcgagccagatgtggtggtacgtggctgtattaccagctttgggagacagaagcataattcaaggtcatccttggctatttagcaagttgggggctagcctgaaatccatgaaaccctgcctcaaagtacttatgttttaaaatgtagctttcgttagagaataaagagccacgcattccatcatagaaaaacactttcttcctttacttcttttcttcctcttgttttttctttctcatccttttctcctcccccttatcccccccacaccattttcataatagacccaggatttagaaatgatccctaaaacacaaagtccccgtgcacagtgtgtctatcaaacctctttaagaagggcgcaccttacctctgggttacctttcaggttcatcgggatggggatctttctacttggagttctgacctttgccaagtgggcaaaatgagatttcttgagtgggtttagtggctgtttaggctagcatgtggatcatatggcaaaatgattctgtgtccgggtcacattttcttaaacacaaaaaactgctacaggaaggttgaatgtcatcaaaaccttcatgaatggaaatgtgacaatcaaataatgtgtgttgaaaagacagtgaagccccacacagcttggaggaacacatgtgtcctggtagagagccttgcagtccccatcactgagagtcagtttgtactgcaactgcctctacccaagagggcgactcacccaggctggagtaccactggcccacagagtatctcttggatcacattagccttagatgttttacccttgctcaccacttgggctactctggctggggggattgtgccagaatccctggtctgtttcctgagcacagggatgagaggccaccaagctgcataggatttacatggtgtatagacctctgtgtcagttctcacacttgtgccccaagctagctcttcaccaactgagccatctccacaggcctgtcccttagttacttccctactgctgtcagaagactccataaccaaagaaacgtataggattggggcttacagttccacagagttgtagcccatggtcatgatagtggggagcatggcagcaggcaggcagacacaggattggagcagtagctgagagcttatatcagatccataagcacaaggcagagagctatctggaaatggcacggacttttgaaacctcaaagctcactcccagtgacacacttcctataacaaggccactcctcctagtcctctccaaacagttccacaaactgtggatcaaatattcagacacggggtccatggtggccattctccacaccttgcattttgtattttatgaacaactatatatactataacccacagatagataaaagaaattaaaacttgtaaggaccaactgtcacatgaaactgcttcttatcggacttagggaagggaatggttcccagagattcagtgtgggactgaactgccaagttcaaaatggactcaagcattgttggtgtcatgttctgaccaaaatttccatctttgatcttgtttgttattctctccccccatgactagcaaagcagaactctgtgtttctcagaaaaccagtactaaaaatctctatggacattgaaattgctttacaaaacattttgatgagtaaagtataaatgaaaaagaaacataaggcttacatttcccttaaatacacaaggggttgtaaatagagaaacacgttcatggaaacatgctggggaatatgctgggactttgaaaaatagttggagagagacatttgatgagcccaagtgcagctggatcttgctcatccgtgacgctttttttaaaaggtaatggattataaataaaaacatatattaataatccacatcagggatgatagcaacacagggggaaaatccctctgcattagtcatccagatggaaaaattctatgaggcttgtaagtgcaacatgagaaacctgtagagcgccatctctcacagactgctctcactcttgctatcaaatacaacggaattgcaaaccctggatgattgcagtgaggacggcagacatcgcatcagtactgccgtcaaaaggaattgcttcctgttctcatgtggtgacatatgaatcctgggtctgttcccttgggaatatatgtaagacggcacgtgtattgcagattacacatgtgtatgttctgaggtgaagttctaatagttcgcttgaacctagattcctttttggagaggtacagttaaatgaactttcaaatgggcgtatggaccaatgattcttatgtttattcctatctggttatgatgcatagaactgcccgctcactcacatgggagcacaagacttgtgtattgttagacacggcagtatatgcactggatcgatttgcagggaagtccagcttccgtttccaggtactctagaagcacctgccagaactctggcttgtcggcagagaagaatgcttctttttcttgtttttgttttgaaacagggtcttgccctttagcctggactgcctgtgaactcatgatcctcctgcctcaggctcctgagcaactgtaaagaagagatcaacagaaaaagttgttttaaaaaatcaaaaagatgtctagcaggagagagaggagcgggggatggagaaagattttgggtatcaacttggttagctgactggaagcctagactcttgttaactgccaatcacacaccaggatgtgtttggtagtgtgtgttcaaagaatactggcatgtaggtcagcacgtgaaaagtgttcccagaatgcactttgtggtgtgcaatgaaggagacattcaagcacagctggaagcggaaggagcaatctgtgttacctctctggtcggttttagtggggagattctctgctgttaccccggctgcacataacactccactttctttagtcttaagttgtagggactcatacctacaaccctcctgacattcttgggttttcacctttatactggggctgtgttactgacctttcttattccaaggctttgagaggaaactgtgattaggttcccttgccccatactttcagaaggtcaccagaaaaattgtcagcctctgtagtcattggaagaacttgatacagtttctgtcataaagattatgtaacatatatgtgtactataaatttaattggctctatttctctggaaaactttgatatgggtatttaaaggatactaaagatcatctaactgctaggatgaccaagaataaccaaaattaaagggatataaatacagagctgcatttctgacctacaccttttcttctctctggggaactactaagttttttgtttgtttgcctccccccccccattctgtttgcctaagaaccacattgtgtcttttaaaacatttatttgcttgtttattcatgtgtgtatgcccgcacatgcctatgtggtgtggtccagttgtgggggtcagaggactactatggagtgtgtcgttctcccctgcctaaagattgcaggatggtgaactaaaaagtcaccctccacacctgtcactgcacagagccatcgtgcctgctcctcttctccaccttaaaatactgtcagaggaaatgtagcactggcttggtggatggcttagttaggatttctattgctgtgaagagacaccatgaccaaagttacacttataaagagaaacatttaattggggctggcttacagttcagaggttccgtccattatcatcatggcgggacttagcagcttgtaggcagatatggtgctggagagatagctgagggttctacatcttgcaacttgaagacaacaggaagtgaactgggccactagatatgacttgagcatataggagacttcagagcccacctccacagtgacatacttcctccaacaaggccacacctcctaatagtgtcacacccaaaccccatactcccaaactttcaaccccacccccattccacaggtggatctctagaacccaaggccagggtatctaaacaatcagtgagagaccttgcccccaatggcaaagtggagagattgaaagcacccaactgctatactgtggtctccacatgcacacatacacaatacacacagacagacagacacacacacacacacacacacacacacacacacacacacacacattctttccttggtcccatttcctcatctaatggcacagtaacaatctcaagcacttctttcttgtccttccatagacttcccatgcctcttcttaccttgcccatctattctgtctcctttatccgtagggacctgggcccagtaatcagtgcataaccggagggaggaatttggagaaagatgtccccatcccaacatcctgtcatgcctgggaattaaagtgttcttggtggtattaaagaagccttcttgaataaaagacatttctttcatatctaaaaatagtttgatggtcagtccaagagttagacgttgaacaattttcacattttttccctgcataggaattttagtgggaattttgagggaggctatttggggctactgtgaagctaactttgtaaccataaactgtctttttttcagttctggagagtgtcacaaatgtttttgtccagctaggaacatggtgaggtcaaatgttgcaggatcaatggtgtgctgcttctagtctgctcctcaataccgttactgtccctgaggccagatgaggacactgactctgcctgttctaacctgaacaattaagagctgctttcttttcctctttgggtagtggaaaaagatgtgaggagaagggactttggaccagctactttgggtctgagctatcacagccacaaagttagaacagtagaactctgggcacatccattgccaacagggtcataagcaaagatgaagatgccaaatggcttagaaaaactcagagaaactgcagcaacatctctctggagccaagaacttagtgttaaagtcacttagaggtcaagattgacccgtgacattatagggccacatcagatgacattgaacaatcacacaaccaaatctatgcgatattagggcaaccttatcatagatatccatgatccagatatcaaaattctgatcaccaagtgagaaaaaatacatactgagtcaactgtgtgagcagggaaagagggtggggtgtccatcggggcagaatggggaagttagtcgtcttccttacacaagctgattttgaaagcatagagtctgtggcttcttttggtaatcaccccgtgttcacggtcagggtgggagtccagtcagctgcttcttctgcaattcccaaatagctgcttcctgggacttagagctcacttcgggggccgtggctttgttttatatgggggtccttttgtttatttatccacttgacaataaccaagctaaaagttcaggcaaaggaatattgaagattttttatttaaaaataaaccaaataagaggttgttttgttgttattgttgctgttgttgtttgtcgagctaatgttaagtcatgggcagagttacggctgagtgttagagtgtaagtcactagctattcacattacagctttacacgtgaacttgggacaaatttaatatccaacacaataatttcagctgccccacaccttttgcactttggaatctattcataacattcaggggaaatttcaccagtttgtcttgagtcgtttttccattttctgctttactttttaaagcaggattttaaacttttcatatagtgcattatgcttcagggttgagatgatcttttcatacatagcggggatttattttgttgtttggggcatacgcaaggtggtgaaagaaggagcacttttaacatgtttacaaaaaagaagtaaaagatgtacagtgttaaagcacaatgtgactgtgaaacctcagcatatgtcatatgaagcaaagagagctgtcaatcaaaaggagcactatgactgctcccctatgccacttgtaaagtattctgctgacctgtgtccttagcactccaaaacaggtgtgatgtaaacagtaaacaaagtggtggggacagacaattaaaatattatttgtcaaaacaaatattttctggggaccttggctgtcgcctctattgctattatctcagtctgtaagagtgcagttgaattaacactgttggttttggttgtttgttttcttattttgaggtagggtctattgcctgaaacttccgaatctcctgtatcagcttcctaagcactggtattacagatttgtatgtcattcctgtccaatcctgattatttttaaatgagagaaggccagttgtactagttagtttttgtccaatttacacaaaccagtgttatctgggaagaaggaaccttaactgagaaatcgcctccttggattgacttggtggcaagtctgtggggcactttcttgaccaatgattgagaagggagggccaaccaactgagaaaagtgccacccctgggtgggtagtcttatacacccctgggtcggataagaaagccggcagagccagccatgggaagcaagccaacaagcagacttcctctgtggtcctccagtttccgcttccactttcctgctgtgagtccccactctgacttctctccgtgttcaactgttactggaagtgtaagatgtaaacccttttcttccgaagttgcttttggaccatggtatcttatcacagcaacagagaagcaaactaggaaaacagtgggggtaaaactcatttctttttctggccccatctttattgggttcttgggatcaaagccactctggattacgggtttattttccctacttaccttcgggacttataggcaaccaatatcaatgtgacaggatctcgatacatgctttgactctacagttcagaaccttggagaactgtgcagggacaaacatccctgatctacatgaggctgtttagaatctactatttaatcctgaaatctgtaacttgacttctgtgatggctactgttcattgtcagcagaatctaaaatcatttgggacatgggtttgcctctggaagcttataccacattaactgatgtgggggacccatcttcatgggaggtggcagaaatcctgagctgtataaaatggagaaatcgatctgagccctggcttgcattcacggctctctgcttcccaggtatgaaagcaatgtgaccagcctccttctcctgccactgtgccttccctgcctgatgcctgccttctgcaccatgctggactccatcattctgcaatgatgggatactgtaccccctttctctcttatgttgctattctcagtttgttttatcacagcggcagaaaagtaactaagacagaaaccacgacatgcatttcaacagacaaaataaatgccctgagtataaaaacagaagaataaagtcagcaaggtttttttgctacttcatacatattctatggaaacaacttataaacagagtattacaaccctcatggaaccctgaatttgtaagatgcaggaccaacaacagaatcaatggatgttaccctaggaatgacctatgctcaactcaaggaagacatagaaacaatgttggaaattgtttaaaatttgcatatttagtttttgcacattttaatattttaaaaagtattctggttcaatggatggaagtgtttgttttgaaatcacgaggccttccaactaaaaccacagaacctatccaaagctaggctttgtagcttgtatatttagttccaggaatgatagcaagagatgggaggtgaaaagaagagaatccctaaaggcttattaccctgatgtacacagtgggaaaacaacaacaacaacaaaaagacaccttgcttcaaataaagtggaaggtgagaacagacacctaaggtagtcctctgacctggtggcacatgccctccttcattcaaatgcagagatgtagacacacactcacatgccccccacatgtatatacacaatacacacagaaacaaaatgtattcacttatttatttgacactgtcattaagtcctctgcagggagaattaaacagaggttccaaactctatactgcaaacagcaaagccataggtaaactaagaaaggacagggagaaagaaagttatggtacataaaatataaagagaaactatatagaatatttaaaattcaagtttctatgtcacccagtatcaagtctatctactggtcctatttatagtggaaagggctggacaatagctgcctctcttggtttgtagttaatctgcttgcaatccacaagtagttaccctaacgtctatacccaagttagaataaccctgattatattttctgtgactttatcacactaaaggataaacagcaaagatcctatactgaaacaattctggagttcacttacagcctggtaacttaatttcatttcctctccttattggaaaggcatagttataagattaaaagctcctttacggagttttcattccagtcactgtttactttgtacataacctggaaaagattgttggcaggcattctttcggtattactaaaatatttccttagcatcaccagtagatacagtaaatggtaataaatgactaagatgggagctgaatttgcatgttggacttcatcacagaacatacaggactccaaattggaaggactgaaaaccctgtatgtctaagagtgtatgcattcagattttcttatcattcctggcacaattcccccactgctcatgtttaattacatttacaagtacaaattcatgcttgttccaaattgtagaattccagttataattcacatattttggtaagaacacagaacacgtgagctacaagcatattttacattcattacttttcccaacaggaaaagatgaaattcgataaaactttagtatttatttatctgaatttgaaattgaattcattcctatgaatttcttacaaactgaatgttctagtttgtttctttgctgctatgatgaaactacaaccaaaggtaacttggggtggaaagggtttattccatcttactggttacagtttatcaagagaagctaatgcaagaactcagacatggcagggacagcagaagaacctctgggaaatgctgcttactggcttatcccccccccaatttttatacagacacctttctgtctttcttatacaactcaagcctattttccccaggacagcaccacccacagtggtctgggcccccttcatcaactggcgtcaagaaaatgcctctgggacatgcccacagaccaatctgatgaaggtaattcccccaatttaaggtccctcttcccaggtaatcttcatttagtctctgtatatctacaagaggttccagagtatttcaggattaaagaatggtctattgaataattcaaatatgggctttcttttttatcaattcaagtggaagagaaaaggctcaagaaagtatctaaaatttgtttctgaacaaaaagtcagtctttttgttattgttgttgtttttcgagacagggtttctctgtggctttggaggctgtcctggaactcgctcttgtagaccaggctggtctcgaactcacagagatccgcctgcctctgcctccctagtgctgggaattaaaggtgtcgccaacaccaccccactcgaaaactcaatcttatgatagctttttatcacatactcttgtggtgatatcttgctcatacaaataaagcctgtctgaagaacagaggatggagcttgccactagctaaccatagaggtcaggaggtctgtacagacagacggaagtgagatggctgggtggagagaggatataagcaggaagaaacaggatctcgctctcttttccactgagatgctaacgaggtaaaggtggctgtggctggctccttcttctctctgatctctcagcattttcctctatatctgactccaggtttttattattcagaccaattaagaactccttttacattttggtgcccacatggccagaacactaacagcaggacaggggtaaatgctattcgtgggccctcctctggccctgagaaagctgccagctgctgtgggcgctctcagtcaagcagccgcacccgactccctgctcctcccctccacccagcaccacgggtttacactatccctagaacctttttattagaactcggagctttgacccagcctgtatttagactaaagggacacactcccagacctcacgacttctatggttagcaggctccttcctgtgatcttcagacacagcaaggtaccatcacatactcctaattttactatccttaagcttccaagtcttccacatttctcccatgaatcagtccgaagtccccaggaactacaaggtcattttttttttatcagaatagcccttcttcttggggccaattttttgcattatttatttttctcagtgttgtgaccaaatatctgacaaagggtaacttaaggggaaagttgtttttttttttttttccccgtttgtttgttttgctgacaatgtaagaggatattatgttgggaaagcaggagagcaggagtgtgagggagacagaagttcaagctatgctaaccttttccttgtgtgcatctcaggaccatggccaatggaacaatgccactcatgtctccttagccaagtttagctgatttagagaaaattctcatcattggcatgcccagagacttgcctcttagtgagtctaaatcctgtcaagggaacaacacctattgacatcatatcacacaactaattttcgatgagactgctaaaatcatataatttacaaatagcatatggggaaataattgacaacagcataggaacaactgcaatcatgtgactgcaaagggaaaaatgtggatctgtaacttaaaccacagaaaacttaatttaaaatagatgagaattttacatggaataatagcacctataaaaatcagaagaaaacaacaggggagatcttcagaacatgggatttggcaaagattcaagagatagggcaccaaaaataccacagtaaaagagaatacagagtgaacttgaaatgaaaaacttctgtgtttctgagacattatacaaagatgggaaaacccagaggatgagagaaaatatttacgaatcatgtaactgaatggggattaatattaaaatatattgaaacattttatataattcaaccataaaagagacaaactagtcttaaaacaggccaattgatccaaacaggcatctctccaagtaaatatagaattggttgtttgagaaggtgtccaacaccattatgcattagagaaatgaaaaataagcctctcacagtttacatacagtcagaggacagccatgctgcaagagaagggacatggcaaagatggattaatactgtgaagaacttctaactatgcacttgcatagtaaaatgatgtgatctggtctcctcacagaatagttcagaaattcttcaaaaagaaaaatgcagagttatcatataatctaggaattccctgcatagggaattcaacttgtgtagtggtacagtagcttgtaaatgaattatggtagcaccattattttcaatagtagttcattatgaatgagcagatagacaatggtgctgcaggcattccatgagggtcatttgaccaccaagagggaatacagtactgctacacgcttcatgcctccactgagatggtccttaaaagtagtgttaagtgaaagtaggcaaccccaaaagtctacattgtataacttttttgctatgataatgagaaagtgcattcagacagaaagattgttgctaggagttaggaacaaagaataaggaatggctgtttacaactcagggtttctttctggctgctgttcatataacctttcaatgtgatttaaaaagcattgaattacatacttgctatggcatatatacattatatttcaatttaaaagaagaaaacatataaaacacaaatatcaccatccttcggtagatgagagagaaaaaaattgtattcacagaaaagttaaagattatgatagaaataaatcttcatagaacaaagtttaaatacccgttagaaaatgggatttgaaagaaaattgaaaaagtaaaaaacaactttaaaaccaaggcacaatataggtgataatactcaaagaacatggaccaaaaagccaaacatggaaatttaagagaaagatttgagagatgagagcatagtccaccaaccagaggcacaggaaaccactcaagagcttttgtccagtgagaataagtcctgatagcttccagaatccagaaaaaggattttttaaatgaagtctcactcagagagatgactctttgctgtactgaaacagagagtggattctgcacagatctacgtgttacagcgcataagacgtcatcaggaattggtttaaaacttttttatcaacactgataaaaactagtgatggctgagaaaatttttctcaagtactgaaggaaaagggtctctagaaactcagatctagtttagctaaaaagttaagttaagttaagttaagttaagttaagatgcgaataaggacaaagccggtaggagagctaacactgagggggagatcccgagtggcttcaacactgggcaaagaattacagaccactgaggagtgctgagcaagggaggaagtctcccacaggggagaatcccaaattggttatctaataccaagtggtcagcccgaaaaatcatatacatacaagtgacattgtaaggattgagcaggctgtgtttacatacatggacacatggacaaagcagtatatatataaaaataaaacaatcaaagaaatagaggctacgtatttgagagagaaagaggagaaggtggagcattggaagggttggagagcggaaaaggaagagggaaaatggtgtaattgtattttaattaaaaaattagaagcaataatagatatttttgagcaggcagagtctcaaaaatttatctctaatgcaatttttaaaggaatcccccagaaaatgttatttattaaagtgaggaagtaaacaaagagccaatatacatggacttggggcaggagagctccaacagcacagggaaagacaaggacccacaggggactttgaagactgagaggacagctgtgggccccaacaggtggcaggcagccagctgaccctggaacaatcaggccatggcaggattctgtgggaagaataacactgaagaaacgcagagccctggcagtgtgcaagaaccattttataatttaaaaacatgtggaaaagctgagcaccgtggtgcatgcctgtgattccagtgacaagggagctcttagaatagggaggctgcaaatgtgaggcctatcagggctaaacaatgaattctagaacagcctggaaaatttacagagacttttgtctccaaataaaaatcaaatatggttagagctatagcacgtaggtggggtgctttcttctcacctacaaggtattgggttcaatctctattgctgggggaggcggttgtatggagaaaagtaagaagatgaaaaataatttacttgctaattatagaaatacagtagaaaatgtgcccagagcatctaagtggcaacatcagaagcatagacataagagtgtaaacaatacgggtcttgtaaaaatatgacattagcccaatgataatagtaactagaggccagtgagggtagaaaaattgtagttaggggtgacgggaggcagggaaatcttgtgtagtagactgtatctgtgctcaaaaataatattcattgttgtcttctgacacccttgatagacaccaagacaggggatgcacttgggcctacacaactcatgcagaaacagtgtgagctgtgtgtgtgtccttgtggttccccatgctcactaacatttacttcctcataagagtccctagacccagagtggccatggaactgatttaaagtaaacctacaacctgaaacagaagtagtaatgtaagccaacctatagatttctaatctagaaataaatatgctcacacaatggctattacttggtagttctctgttgtgaattgttgttgtggcaacctagaaaagaaaccacccccaagatccatgaaatgaacaaaacctccagtaccatgcatgagaatccttctcttgagttgttactcaggggagtccgagagaacaccacacccctgaaaaaattaaggctactgcctttgcctttggtggcctctcggagtttgaaagcaagaccctgttgctgaagcgtgatgtactttggatgcaggacttagaggattcaaactgtaactgactcagaagcgtcatccctgaggagtggctataatagtatcagaacatgctatgccaactgccaaaggagaggaacaaccagcaaccctacccaagctgtaaagctgataaatacaacagtgactggactggagaggcaccaggatggtgaaataatgacactttatctttaagataaccaacagatgtctagatgtctaattggatttaaagcttgctcaacaggagggaaatcacacctagtcctgaacacccagccatctgcctgtgcctggagagttcacaggcctgagaggagaacttaccattgtcacttcctaactagtgtaagccctaactgcctgttactacttacccttgtccctacagatcatggtagatcttgcaacagatgggatctgctacagaaagccatatctggtcacaatgcagaaatccactgattctagagttgcccacccccaactaatacatctacgacacaacacaactgctgaacctaagagtcagggaacacctcagaagaggaggcagaagggttccaagagccagaggaccaggatgcctgttgtgagactgtgccttctaaacaacatggctgcctaaacaaagacctgaacaaatccaacaacggttaacatctcaaagtaaatgggaaaatctcaagggaccacatccctagaggaagagctacaagcaattaacaactgagagacagagaattattgtctcccagaaacacgcccccatgggtttattatctaataccaaatagcaagccctaggaacatgtgtgcaggtgaccctgaacagactcagcaggttgtgtttacatatttatgtgtatttacaacagcaatggttaaaggagaggaggccatgattgggggaatgggggggtgggcaaaagggaatgaaggagggaaaagagaaagaggggaaatgatgtaattatatatgaattaaataaaagtaaagacaaagctagtcatctgaagctagcccttgattcttgattcttaaatgtcttccatcatggaaacatggaaggtgatttaaaatgcaaaactcctatgtctgtgtgtgtgagtgtgtggggagggggcatacacacacaaaggaaacagcaatgtagtctgaatgacaaattatttgtagaaaagaaactggaacaacagggatacgtttgggtaagtgttatttaaagcaacattaataaaagcacctgaccctgtattagtaacataataatgaacataaagatagtagtaaagttgtttgacatagtgtcaggaatgtttaactgacaaaagaccaaacaaaaccccagacattaagaagagcaacaaaacacatgcacactacagtacctactatccaactagaagagaacggagaacgcagaatgcctgagaatgatctggagccgaactgaagatggcttgatttcttatagtggtgttccaaatgtcaagcaggcacttacttttcttttccttctgaatctggctatttcaaccatttcctaaagcgttagctctcctttatctgatccctgcttgtttctcttacatttataactactcgaattgtgttactccatcccttgacccaatcttgaagatgttagcaggaatcctgaatggtctgtaggaaactgaaggatggttgggagggatgtgacagtctgtggctgtgtctcacactttatccccaacaactaacaaactttgtttgcctggtgtctgctctcttatcaaaaaacagatctgttgggatggctttagcaacaggagaaagaagatgctgagggcgtggtctcattcgaggcaccgctgccgactgacacttgattcacagcacacatcttctcctggatgctcagacatactcagaaatcagatagctggagagtgcttaaacacagctgtatcgctgcccagtgcacaggaggacaacctatttgtcatcactcaaagccactttaaaaccacaacacaaaagcatacaaatagcttatgtgaaatgccttaagtctgtttattgacaccctgaagttcccacagggtctaatccccactttctagaagcactagaagagggtcctagataaatgccactaattagatatgtccatctttcttgtctttctcctttgtgatccttttctttcctgtgacttttcttaacctttctgtgacatcgctttcctgtaggtccattggaatggaaaaggtcactaaagaagggatgagcctgattcagtaaatacagtgatacagtggatggcagcaaagaaaaatatctgatgtcaacctctgacctacctacttacacacacacacacacacacacacacacacacacacaggctcacctacacaagtgtgttccacacacatgtgaacatacattcacaaatgcgcataaaaaacctgaatttctgtttttactaatataaatataattataaataatgaaataaggctgtggaagtacagagaggagtctgtgtattaaatacctgactatgatgactatttaatttcccttctaacaaagtaaccacggtggaacgcctctatagtgtctccatctcaactgcattgtgtattgcaaacacaagatttttgtaatgaaatgtttcattcatcattatggactgtattaccaaattaatgtgccatctttggtagaggaatagtacattgtacttggtttggcttaactagcccccaacaaaggtcagataagtatctgaagcatatcagaatcattcaaacctccctgggtgtgttgtcaactctgacaaccgcatgagaacggcagcccgtccttctctcctgtttccattgtgaaaacctcatctccacaaaaaaccttatatacaggagtctggagcatgttgtctgccccttcccattcatattaaaaattgatatcatctccagctaagattacatttcttatctgcaagaacgtggcctctgatttgaggaaaacagtatcagaagcgtggcgtgcttctggctttgagtcttgctttcatctggaacatttcccttccttagtccccaagccccgcagtcatttctcccctgctccatctagaactgcagcctgtcttgatgctccactctggtcagacctgctccatttctcctttgattcctgcttattctgagtaccccatattacttatttttaccataactcttaccaaatgcctcacagttaagggagggaggatgtgtttaggaccacacctcgtggcaattcagtccatctgaaggagatagtcggggcagacaggtccatgacaggtggccatgacagtgtgaaactatttctaacttgctgggacatcttgcatctccctagcaaaggaagcaatgactgataaccagctcctatcgatgcagagagccacctcctccagcgaggctccacctcctccagcgaggctccacctcctccagcgaggctccacctcctccagcgaggctccacctcctccagcgaggctccacctcctccagcgaggctccaccactagctgggaaccaaacattcaaatatgtgggccagtgggggacatttcacatccagatcataacaagtccattattgctttgcatttctcaagcttttcactcacacaataaatattcactgcatttttttgtatgcccaatagttacaggtgctgaatttaaaacaatgaatgaagtaggggagaaaacataattttgttttctttgtatgtgacgtctatagggaatacacatatatgcacaacaaataggggtaaaataggtcatttgtaatgtgtcactaaggagtatcaggaaagttaaagcagagaggtatagaaagtcttggaaggggatacaaagcagattgcctggaaacaatgacccaaaggtcatatgtacaggtgtgaccatgagctatcctgaggaaagccactccaggcaaaatgacatctgtcaagaccaggagacacctccatgcctggagtacttctgactagcttttcttctctctctgcatattgtctaccctcagggatgaagagatcagcacccacacctgccactctcagctgagctgtcaaaggatcctgcctgtggcctctactctagtgatctgtaagcatttcaacctcaagacaatgccaagcaagctgggattcttcttggtaaacgcagatggctcacagccctgggaagaaagcaagcactcctgccctcatattctggtgcaattgccaagtttgccaaaaaggagaattgctaaaagttgaggaaatccctgagaaaaaaatctagagcacattctcttcctagaattactcctttctggtagccacaaaaatacttggaactttctctggtctcttctgaaactaagagcaatgcaagttcccagaattagacatttacccatcactgcccttctagacttctagatatcaccactaaacatccttaaatttatatatccaacataactccccatttttcacctttatgatagtcaatcttccattactatgacagaatacccgagactctctgttcatgaagacaaaaaggttgactgtcttggcagtcctgtttatcatcagcaaaatgaccaagaagcaaaagaagagaaagaatatgatacggtgggcctaaaatatctcaaggccacactcacaatgccaaacattccctaactaagccccatctcctatgatctatcacctcccagtcatgccacttggagattgaacctttaacatatgaagtctgaggacgaattgtaacacggtcctggcacttgtccctctcctgatctcctctctgtcaggcaatagctcttctgtatactgcattttccaggacagaagtgatatttcctttgattcctctcctctcctataagagaaacccaccattcaggtctgcctgcacagtggcactgcacatagcttttctgtctcagtcatctttaccaaagccagaccacttttatcatctctttggtctatcttgtcaactcgcaatgccaggacacagtcccttgacttttcctgctattaaataaggcagtgattaccagacccattctctgtcccattgagactgagagacaaggaagaggagggaagtccccgaatcattcattatacacagccagtgcccactgtgaggcccaaatgagagctgcattagcatacaccttgctttagccagctaaatgaacttctggaaagccacactcctgaccaagctggcaatgtcaggtagttcagattcagaattgctttttttttgtctgtggctagagctgtgggcaaagtggtcaggacaaggctgtattgggaagaagcagaaaaagcaaccatctccaagggatgaactagagagggaaggcacgctaactgaaaagagaacataaggagaacatgcaaagcctaacctccctggtgtggaatcttcatgcgttcattggcttcctcacctccccatgtacaggaagccaaaacccttgacatggagggccattctggggtgtacaacagacactcgagaggttggctctctacagtgggtgttgtatgttgaccacagcctggcagcgctagtcccttgtgacagtttgcttctggcaccacatggttcaactgagacgcttgacttttctgtctaaagcctaaacgtttggcatcaatagccacaatctggcatatttttttttgatgttcatgtgtctaaaagctggagagctggaaaacactagaagtcctcaattagtgtccactttagaatatttggcccaagaaaatatctattctcatgatgcaggaagttggtttgcaaaacgaagcctgaaccagagccagaaagcaagcgcccttggccagcgcatagatgaaatgtgatcttggctacacaggcatctctctcaaagttatttgcagctgccacgacacatctttaagattctaatacgcagagctgttatttagacattccaagagaaggaaacaaatctccgttgtttacatttaaacatgatgtagtgagatgctacaggagaaatgtaaacattgcagattgggcaaggcaagacatgtgaagcccagctcaagtcacagaatagactcaaaggatccagagcaaaggcagaaaattgaatttccataggagagaagcagtgtttattattattccatttaaccatgtgaggtattgacgggaaatacattgtctcagaaacagtgggagccaaagtaataggcagccttaattatacattagatgcaccctaaagagagaagcatccatagtttataaaggaaagttagtagctttaaaataagcattttgatggtgtgctttctttattctttttcttcctttattctttctccttttctcccttctctctcctctccttgtctgctttttcctttctttctttctttctttctttctttctttctttcttcctttctttctgtttttacttttacagtgtgtgtgtgtgtgtgtgtgtgtgtgtgtgtgtgtgtgtaagtatccctacatagatgtagttatggctgatctgttagtccctcatgtaatccaggctggtttcaaatttttgggaattccactgtttctctacttctgagtgctgggtttctaggtatgcacccccacacccccagaaaatgattttagtttaaattcagaaactctgtgtgcatctggtaatagatgattaaagtgattcaaacctcacaagaacacaggaaacagacaattcccatggaaggagagaaggaaggaagaggggtgaatgcaaaagaccaaagggagagctattttatttttatatttaatttgttctattgaatagtagcttggagggtgacagggttgctaattacaacactacagtttcctccagggctctaggtgcagtatgagatgtagaatacgtggatgagttgtctaaggatgggtcaggcaattgtttctgatttcctagctggatccacgaccctgagttgacagagggtaacagaagcagttgtgatgttctttttgtcctcactactaacccaacaaacacatccactgatactttcctgttcctagaagggactaccggtggccgaaacacaagtcattagtgagataaaccacagacagggataactggcatttttcttactctctggaaacataaaaagcaacacctgaccctggcaccatccttgtttccatcaattgtctccttgatgcgacacgaaatctcccgtatgaagtttagttgagtggttgtttttatgctggttgctctggaagcagatttgggagggtcgtctccattgtcagttgagagaggacagatggtcctggctttctaagaaaactagtccagcatgagccagagcaaaccagaaggcagccctcttcctcagtttcctctgaagttcctgatttaatgtcctttgggatgggctgtgcctgcgagtgtgagctaagtaacatctctcctccactaagttgcttttggtcccagtgttttatcacagcaacagaactaagagagctaccacagttccagaggtcaagttgctgccccactcatccaccatgtgaccctagaaaatccatttaacatctcagcacagaccacacctccagtataagtaacaacagcaatgcctaccctagtggcaaccataagtaccaaaggggaacacagtgagatgctcacattcttctgcaaatgatagctaaggttgtaattactctgtagaacttagcagaaaacaaatattaataaactttggtggttcctacttcactaaaatccatgtgaacacagcagagcatggtcctgaatcctgattcctaaatgctgattcctgagtgctgcatccctgagtgctgcatccctgagtgctgcatccctgagtgctgcatccctgagtgctgcatgcttcatccagatgatgacatcacctcacccgagcatctgccaggctgcttccctcttcacgaataagaaaatgattcttccttgtattagacatcaatggtttgcattcattactgtcatattgtctaatatgacaacaccaaccagaacaactcaggactccttagaaaggggactaaagaaaataattgtattttaacctcttagcaaaagctggtgaagttcgctgtcttaatgaaacaaatgtcctacttcttcccaatgccccagcattgaagaaggaatgggaagatgacagtataagaacacattaaacaacagaaaaaccaatatgacaccaccagaatctaggaactctacaccattaagacctgaacatcctaatgcagatgaagcagaagagaaggaccttaaaaacaactttaggaagatgttagagaccctcaaagaggaaacaagaaaatctcttaaagaaatggtagaaaaaaacaaacaaagaataaaagaaatggaggaaaagacaaaccaaaaaatttgagaataagacaaatctcttaaggaaagccaagaacaaactaccaaagaaagtgaaggaaacaattcaaacagttcaaggcttgaaagtgaaaatgaaaacaataaagaaaacacagaatgagggaatgctggaaataaaaaagctgggtaaacaatcaggaaccacagatgtaagtataaccaaaagaatacaagagatagaagagagaatctcaggtgttgaagacccactagaagaaatagagtcatcaaccaaagaaaatttcaagcccaacaaatccctaacacaaaatatcaagcaaatatggacaccatgaaaaggccaaatctaagaataataggtatagcggaaggtgaagaaatacagctcaaggatgcagaaaacatattcaacaaaatcatagaagaaaactttgccaacctaaagaaggcatgcctgtgaaagtataagaagcttacagaacaccaaatggactgtaccataaaaagtccccttgccacataataatcaaaacaccaaacttacagaataaagaaaaaaatattaaaagcagcaaaggaaaaaggccaagaacatataaagtcagacctatcagaattacacctgtcttctcaatggaaactctaaaagccagaaggtcctggatagatattctaccaagactaagagaccatggatgccagcccagactactatacccagcaaagctttcaatcaatatagatggcaaaaacaagatattccatgacaaaaccagatttaaacaatacatatccacaaatccagccctacagaaagtactggaaggaaaactccaacccaaggaagttaactagacccacaaaaacataggcaatagataatcctactttaccaaacaccaaaagaaaaaaagcggggggggggggagacacccacacataataccaccaccaccacaaattccaaaacaaacaagaactaacaattaatggtcattaatatccctcaataccgatggccttaacttacctataaaaaacacataggctaacagaatggattcaaagacagaatctatccttctgctgcacacaagaaatacacctcaacttcaaagacagatgttacctcagagtaaatggtcaggaaaggattttccaatcaaatggacccaagaaacgagctggtatagcaatcctaatatctaacaaattagacttcaaactaaagtcaatcaaaagagatgaagaaggtcatttcatacttatcacaggaaaaatccatcaagatgaagtctcaattctgaacatctatgccccaaatacaaaggcatccacattcctaaagaaacattactaaaatttaaccacacataaaaccccacacgtttatagtgggagacttcaacacaccactctcactactagacaggaccaccggacagaaacttaacaaagaaacaaatgaactaatagaagttatggcccacttggatttaacagacatttatagaacattccatccaaacacaaaataatataccttctcagcaccacatggaaccttctctaaaatgaccacatacttggcaatatagcaaacctccatagattaaaaaaaaaaaaaggaataacttcctgtatcttattggaccaccttgcaacaacacaaattgcagaaaccctacaaactcatggaaattgaacaatgcacaattacaccattcctgggtcaaggaagaaataaaaaaggaaattgaaaacttcctagaattcaatgagaatgaagacacaacatatccaaatttacgggacactttgaaagcagtgctaagaggaaagtgtgtagcactaagttccctacatgaagacactagagaatagtcacactagagaattaacagcacaactgaaagctctagaacaaaaagaagaaactcaccctggaggagtagacgccaggaaataatcaaattgagggctaaaatcaataaagtagaaacaaaggaaacaataaaaagaatcaatgtaacaaacagttggttcttcaagaaaatcaacaagatagacaaacctttatccaaactaaccaaaaggcagggagaaagcatacaaattaacaaaatcagaaatttaagagggacatgaccactgataccaccgaggaaaatggacactgaggaaatccagagaatcatcaggtcatactttgaaaacctgtacttcacaaaatttgaattttaaaggaaacgaacaattttctgcatagatgttacttaccaaaattaaatcaagaacagataagcaatttaaatagacctaaaacccctaatgaaattgaaatagtcatcagaagtctcccaaccaaaaaaaatccagagccagatggtttcagtgcagaattctactagaaattcaaagaacagctaataccaatactcctcaaagagttccacacaatagaagcagagggtcattgccaaactcttgttaggaggctacaattacgttggcacacaagccacacaaagacacaactaagaaagagaaatcatctacaatgatcaagtaggcttcatcctagggatgcagggaaggctcaacatatgaaaatctgtcaatgtaaaatccactatataaacaaactgcaaaagaaaaaaacacatgatcatctcactagatgctgaaaaagcctttgacaaaatccaacaccttttcataataaaggttctggagagatcagggataacaggaacaaacctaaacataataaaggcaatatacagcaaaccaacagccaacatcaaactaaatggagagaaactcaaagcgattcctctaaaatcaggaacaacacaaggctgtccactctctccataccttttcaatattgtacttgaagttctagtgagaacagtaagacaacaaaaggagatcaaagggatacaatgatctctgtgagtttgagaacagcctggtctacaagagctagctcccagacaatctccaaagccacagagaaaccctatttagaaaaacaacaacaacaacaaaagtagccctactatatacaaaagataaatgggctgagaaagaaatcagagaaacatcaccctttgcaatagccacaaacagcataaaatatcttggggtaatgctaaccaaacaagtgaaaaacctgtatagcaaaaactttgagtctttaaagaaagaaattaaagaagataccagaaaatggaaagatctcccatgctcttggataggtaggatcaacatagtaaaactagtaatcataccataagcaatctacagattcaatgcaatccccatcaaaatacaggcacaattcttcatagaccttgatagaacaataatcaactttatagagaaaaacaaaagacctaggatagccaaaacaaccctgtagaataaagcaacttccagaggcctcaccatccctgatttcaagctctactataaagctatagtaatgaaaacagcttggtattggcacaaaaaaagacaggtagaacaatggaatcgaattgaagaacctgatattaactcacacacctatgaacacctgatttttgacaaagaagctaaaactatacaatggaaaaaagaaagcatcttcaacaaatggttctggcataactggatgcagacatgtagaagattgcagataggtccataactatcaccatgcacaaaactcaagtccaaatggacaaagacctcaacataaatccagccacactgaacctcttagaagagaaagtgggaggtacccttgaacaaattggtacacgagactgcttcctgaatataacaccagtagcacagacactaagaccaacaattaataaatgggacctcctgaaactgagaagcttctgtaaggcaaaggacatagtcaacaagacaaaatggcaacctatataatgggaaaagatcttcaccaaccccacatctgacagagggctgatttccaaaatatacaatgaactcaagaaactagtcaccaaaacaccaaacaattcaattaaaaagtggggttcagaactcaatagagaattctcaatagaggaatctaaaatggctgaaagacacttaagaaagtgttcaacatccttagccatcagggaaatgcaaatcaaaacaactctgagattccatcttacaccgtccagaatagctaaaatcaaaaacaccaatgactgactgtgctccacatttctccacatccaatgaggatgtggagaaaagagaacactcctccattgctggtaggagtgcaaacttgtgctgccactttggaaatcattatggtagttcctcaggaaaatgggaatcagtctacctcatgatctggcaattcctctcttgggcatatacccaaaggatgcacattcatacaacaaggatatatgctcaactatgttcatagcagcgttgtttgtagtagccagaacctggaagcaacctagatgcccctcaactgaagaatggatggagaaaatgtggtacagttacacagtggagtattaactcagcagaaaagaaataaaaaacaatgaaatcttgaaattcacaggcaaatggatggaactggaagaaaccatctcgaatgaggtaacccagtcacagaaagacaattatggtatgcactcactcatatatggatattagacatagagcagaggattaccagcctacaatctacaccagcagagatactaggaaacatggaggaccctaagagaaaaatacatggtccctgaagaaggggaaagggacaagaactcctgagcaaatttggagcacagtgggaaagaggagggagggaggagaaagaggaggggtagaggagggggaggagaacaagagggatcaggaagactgaatcaggggagaaatagaggagagccagaaaagagatacctcaagagagggacccagtataggtttaaagagaaatctggcactagggaaatgttcagatgcccacaagaacgaccccaactgagaatcgaggcagtattggagaggccacctttgatgtccttcccctataatgagattgatgactaccttaattgccatcctaagccttcacccagtagctgatcgaagcagaagcagacacccacagctaagcactgagccatacttctggaatccaattgtagagagggaggagagatgagcaaagatgtcaagaccatgctggagaaacctaaagaaccagctgacctgacctagtgagagcacagggacctgtaggggaacctgcagccagcccctaagtaggtgtggcctacttagctacagccatgcctacttaggggctggctacagggaccccagtcataaaactggggaaccagcattggactgaagcaagccctctgaatgcgggtgcctgctaggaggcctgcagtctatggggcctctaaaggtggaaccaaccctagtgcacaaatggacttttggagcccattccctatggagggatactctctcggcccagatacaccaaggagggcctagcccccacccccaaatggtgtgacagactttgatgattcccccatggaaggcttcaccatccttggggcgcagctagggggtgtgttggggagttgttaatggggggtataggaggatgggagggagagggaaggggagttgatgtaaaatgattgtttctaaatgaaaaaaagaaaataagaaaaggagagtcttcctttaatcctagcactagggaggcagaggcagaaggatctctgtgagttccaggccatctgatctacagagccagttccaggacagccagggctacacagtgaaaccctgtctcaaaaacaaaacaaaacaaaagaagaagaaagaaaagaagaggagacttcaaggactgaatcgtaaggaggaggaggaggaggcagcaagccatcagtggtcctgaggttttggagggaaggcgtggataggccacagagatgccacggagatgataatcttgcaaccaaagctatgggctccttttggggacggagagaaaccaatggcattgcccttcaaggctaataaaaaaaaagtgttattggtgcccaaaaccaaaccgctttgagaattggtatctgtcaccaggctcacttttatgacacctttcaattaaaagttttaggaccatattcacacagtcacttatagagtgtaacagcaccccaagtcctagacctgatatagtaaaaagtccaatgtataagtcactatgattcatgctaactgtggggcccaatgaactgatactttcttgaatgatgggaacaatatttttctgttttctaagcatttatgatgcttagtagaagtagcaaagccagacactagggaattgttatggtgcttttccacttgaatactaataagaatttaccaaatacgtatgtaagaaagaattgattgtttaaagctaaatctgcttcggtaaagtaacaatgagaaatacattcacggatcaattgaagagttatgttataatttcattgctcatgttaactctttcacctggaattataaaataagtgagtctagcccacctttgcagaataggctgaagacctcagcagacctgttgcttgtgcagaaaagagttgtgggttgtgctgccaaaaatcttaggatgaaggagcttttcattgccctataaattgtcctgtttgcatgatgaggtggcttctgagagtgacaggaaatcacagctctctggggactttctaaccacttgggactgatctatggggaagacttcactcatgagctttctctgtttaagaataccttatcttgatcttaaagttaggtgggtatggagagggagaggtccagaaggacttaggagggggaaataacatgatcaaaatacatttcaattaaaaattgttttaaataagaaaaaataaaaacgtcctatcttttgtggtttttcagaaaagaagggcccggtgcacaagtttgtcctttgtatcactagtgatttctttcatctgtttgctttgatttgttttgtgtgtgactttgaaataattcattatttaattacagttttttttttttttaattttcaaagccaaagagattggccagctatctaaagtaggcagtataggattccatttctaaaccaatgatacaattgcaccagaatcttttgttttaattttactttcttagaagtgtgtgtgtgtgtgtgtgtgtgtgtgtgtgtgtgtgtgtgtgtgtgtgtgtgtgattacaagactaagtgaaaacatacatgaatgaaaactactaagaaactgggcaagggcaagtatttccagtgaaaagtgctctctaaataaaatattgtctgtgtctccacatgttatgatattgcaaatattatttatgtttacatgtgcatctgtgtgaagaagaatagagagctttggggaggagtgagacatgcagtattactccttggtttgtgttttagctatgtatactttttcctcttttgcatctggctgcttttgatatgcaagacatgatatcaagggactctctgggactaaagatatatacagatgtttaaattataacattaaaatatgggaatggtctcacccctcatccttagagaccggccctggctctctgcttacaaactagcttactctatccttgtttattgggtttggattttccacacgcatcacagtgattgaggggttttgttctcatacctagacgtgttgtaaaaaaaaaattcttgtcctatactttgtattttgtttgatgtgagatgcctgaggtcacagggcaagcactcattgtttgactggactacatcagaggagccttgtgaccagtcagcactggccggttagggagatgtgaagctatctaagagaggcagagagggagagatatggaagaaggcagggacaatgagagaaagagaggcagaaacagagagaaggaaatattttgaagtcaaggcaaagtgatatggactgacagggctcagcagccttcaggaagagacacctgaagcgggcaaagtatactacttgaggctttcagactggtcttcagctactcacaacaatggtgatgttttcctttggtgtcaagatataagcactgtgcaggattgttgcaaggggcaagagccttagctcagtgggtaaagcgattgtgaggcaagcatggggacctgagttcagatccctagcacccaagtcaggtgtggcaccatgcactgccctgaacaagcagagatgcctggggctggaagaccatttaaactagcctaactggtgagttctagtacccagtgaggggactccaggtgggagggcccttcacccccaacccaacacagaaaaacatgcttccaccttaagcacatcactcctaaactgtttttttctccgcctgcccatcgtccatctgccccatgtgagtctttggttacaaaaaagcacttcagaacaaaaacacactggctggttgtaaaggcttcattcatggaggctggccccagggctaaatggcagagtcctgccagccatcaaacttagcttttaaacatgtgcagcatttctctaagcaaattggttccttaatatggtaaaatgtgcagcacccaagaggaaaaactggtgatctcatagccccaaactgatggagtcacagccccgtgttcctgaaaagcactcaaactttccattttgataaaaccagaagcaaataggagggtaggtcgtgtttgctgttcattgttccttctcactgaactctttctcctcgaaggcacagcacagtggtttaattcacagcttatggaattttttaaaaaatactaaaccattcaaatgttttctatattaaccagggtgcctaaggatccacagggatgaataaacacagtgagctggcaggggcctttggtggcataacgactgagagttataaacagtaaacaaaacatagtaaccactagaagcacgagagatcacccatcacgtggggcataaatcattagcttaataacttcagcagctgtgtctccaaagcaaaattaagacaacggttccccctgtggcaataaagaagtactgtaatgctgacgcaaataaataaatatccgagagaagaaggcatcactgtaccttggaaatgagtaaaagctaatgtccgataaacaacggccgctctcatctctgggcagcgctttgtaggggtgagaagaaggtgctccttactcttgtagataccaagacaggcaccgtgcctgatccttgcagtccccacagctagcttgtgctgtaggtagggcacacgccgctgacatattactaatctcaagatgacaaatttctctgagctataaaggcaaacattaatcactgattcagaaagagccaaaggaatgctaagctgagcacagaatagagagaggatcaacctccagccaccaggggctctcaagctagaaggccaacaacccggaaggaaacactttccaattttgttggccacaggacccagccatatgtcttccacattaattttgctgagtgccaacgatcatgttttctaaaaaatcgactgactactaatgcgttcatcttggataagagcacttggctacgggacattaccacacaaaaaggctccaggaaacatctccttcccctggctgtgttccatcagtaccttgtttttctcacttcaatttatttatctgttttacagatagttggtatagcttttaaccacaatctcttaaaaggagagttctgggtgaactgttgtgagcacactgtctcttagacatagacacgtttgtatctttccacaatgccagacttcattacattaccatcaattcacaagccatattgttttattggaggccatttgtcccaatttctcctgatagctggccaaagaaatcttcttctattctaatcttaactactgttgttaactctcagatcacacattacaaatcacacagtaaatatttctacacagatgcatttgtgtgggttacactttgctaccaaggagcagcaaggccaaagcagaatgcaaggagtttcaaagaagcctaattggaggcgagcagggattcaggggtacagggatgcaggggtgaggatggctgtgtgggaagataacaaaccctgctggatgtctgctagaagggatggtgtggagtcaagcacagggtcagagttgagctgtgtctcaaggtggagtggacaacagaaaaacagaatgaggtaaggctgtagaggtgaaagtcgggactggatggatcaaggggtggatggatggatggatggatggatggatggatggatggacagatggaccgagggttcacatggacaaatgggtagacaaagagggctgttctaacaggccatgtcaccagtagagacaaaccaagctgaagcccatgggacactggaatgttctctgtaagcacacgccaggtagtcagctgacaggccagtggtgtcaccagcatccattgcaggattatgtgtttttctctgtaagggtcccaggggaggaagctgcccctttcctgattctgggagcccctgatacgatgtaaattagcttgtgtgctcatatgatctcagtacgctttaataacatatgggggtgtactttccacttccaggaataaatcatttttcagcctgtgctgcataggtggtgtcattcacatgtccactgaagtgacagtcatcccccaccttcagtttggagtccagaactgctgctgaagtggtgtctctttggcaggtcacatgccactgcttgcacagcatggagtaactggagcagggcagagcctgacttcaacactagtgcagtatttttttttaatttatcaatagtacagtttattttaaacaatatccgctaaagggactcacccagtaggatctctaccccatgtatttgactgtgggttagaagttatcagctgaatgaagtggtgaataacacatccaattgatgttctaagacaggtcaaagccagattctaggtaaaattgtgaataaaacatggtttgtcttcactataatgccttgctcagcctcccagtgttcctgcctcctttagtgtttcatgcccagaccgccatacttcttcaagactcccaagggttgatgagtgtctcccttgacattaatttgggttgtgcccgatgtttttcatatctatgaccagttgatggcaaggacaatagcagaaataggaatggtacctgtctcacactaagaatgaaccaattcaaaattagctcatcaggcgggattgccagctactctctaccaggccaaaagaccttctaacccaaacacttatcaaaatatagtggctgccagatttggtgaggcatgcccattagctcaatactcagaaggcttaggaaacagggttgtgagttcaaggccctcctgttacaaaccaagatcctgtgccaaaccaaacaaaatccagaatcaaatcaacaatgataacaacaaataataattgcttgccaggagtaaatgacatcctggtatactccaaggcaccgccaacaaacaaaatgaatctaatacctgcacctataaaatgctgatatagttcaaagtagatcatgtatctaacaagagtttagtacaaaaatttgtaaagaaattttatggtatattagtaaaaaggcaatagcccaatttaaaaaaaaataatttctataggcttttcttcagagaagaaacacaaatggccaccaaacacatgaaaacatatacaacatcattaatcactgggaaaatgcaaaccagatgtggtgatgtaatctcagaaatcagcaggtgaaagcagggggataaagagtctagggctagccttgactaaataatgaattggaggccaggctgtattatgtgagacactgatcctctcccccacagaaaggaagacaaaagcccaaattagtgacatcagctcacatttgctagcatggcagcaatcagaaggcaagaaagataaataacgagtacttaggtgtgcttgggagtttcagtgtctacacactgctacttaaaatgccagtgctgcagcttctgtggggaaaaaatttgttagttctttaagaagtgaacatgaagttcccatgcaatgtgggaattctagttagtcatggcgacacatgcttttagttccagcactctggaagcagaggcaagtggaccttcaggagtttggggccagtctggtctaaagagcaagtttgaggccatccaggactacacagtgtctcataatgaagagaacaaaagcagcctggcaattgcactcctaggaacagacacatgataatgaaaatggatgcccaacacaaatttgtgtatattattacagcagtatatttcatcataccagaaaatgaaaactgctcaaacatccacacactgataagcagactactgtacaaccatatgacaaattaaatccataccaagaaacgaagcggtgatgcatccacgtcatgaatgactttgatagcaatatgctaagcaaagaagccatgcatggaaggtcagctaatgtattgtcaacggacaagttaaacagattaaaaaaaaatggattactggttgccaggcatggggctgaggaaatgatggactatggtttactaacaggtatgaagttcattttggggacaaaaagaaatgtttttgtatgaaattctggtttgaactgtacagctttacaaatatgcaagaaccactgaaatgtaaagagtcaatttcaaagtattcaaattgtattttccattagaggtaaaatagttgttttttttaacatacaacttgccattcttatgtctctaactgtttggaccaaagtttaaaaaaacagcaattttttctagctctgaatcaaaacagagattctttcctccaataaatgattgtgcttagtttgttttgagtatacagatttttaaaataactattttacttgtacgtatttatggggtacaggtgacaacataattcatatacacagtatgtggctgtcaaatcaaaatacttaacatgtgtaacttcttaaatatcttgtttagagctcttgattagcatggataattaccccttgctctgcaggttagggagagttcaatacttgtatacaagacacactgatggagatggcaaatcttccttttccttcttattagtctgttttttttcctcctcttgtagatgttcaggtgtggagagtcaccattcaggagaaaactagaacttgctacttctgtcagtgtttggggacccatcatcaagctgccccttttctttctgtgtctagaattacacctctcatgctcagaagttcatgttagctgtacgctatccaaaagattccccagattataatctggatcatacccgccaatgtacttaactaccattccctaaaataatggtcatttttctgggagcaccgcctcccttactctgccttccctatgtctacttgattccttattaagagtttatgcaaatgagataactggacgatggggagatggctcagtgggtaagacagcacaaacatggggacctgaacccatgcaaacccagatgcagtaggtcacatctgtgatactgtgcaatgattgtaatacagtgagatgggggcggagacaggagaaaccctggaagcttgcaggggaactagcctagcatccacagaggtgagcaacagagagaccctgtcacaaacaacatggacagggaggatctagaccagatgttgttctatgacctcggcactgtgtcctctgaccttctgacctccacacaagccctgtggtattaatgtgcccacaaacatacatgagaatacaggggattgatacacacacacacacacacacacacacacacacacacacacacacacacacacacacacacacacacacacactcacgcatgcatagaaatatattgtctcttcagtttttgtgtgtatgctccctgaatctctctctggaatgttagccccatcaggacaggatgttggcttgatgttccttccacctaaaacacagggaggcagaaaagaattaaaataggagagccatctaataactgaagtccagaatgtcaagtccttccctaagccaacctctcgtgatgttaactctctgatccccatggctttgagatcttcagcagcctgaacttctgctccctctctgctccattcacacaccctgtccagtattgctgagcccagccaagaaactgcctgctgcatagcttggcttgggattctcagtgctgacctggaaatcagttctgatgaatgctgttctagcagccaaaccaaaggctaagggcctttgccttttctccagctctccattcaagatgaattattttggccaaacaaaacagtctaggacacattgtaagggacctgtaagtcacagactgtggctttagagaaaaagttaaacaagaaagcaggtctctagaaggagactctgtggcctcatttctgctggcatgtccattatgtcctacgcttgatcttaagacttgcttttaaatatcacctcattggtctacacagaatcactccagatcattccattcatttatagctgccttcatctatgttttgggcctttattaggtaaaacccatttcaggtttttgtttggtttggatttgggtttcagatcatcagactaaaagaaccaggttaaaaattatttttgaaaatggatgatttagtcatagctcatgtggaagatgggctgccatcagactctaaccagctgaggctcctggattgctctcagggcctcttggcagggaggagcattctctctgctgtcacttgaagctcaacacacagatctccttcatgacttactgtcatctaaaccttagctttacgatagcttcaactggacgtacatgtttgagggagagtgtggaaagactgacacccgcctgaccctcacaaacctgctagtgacggtgctgatgacagtgagcatctggatacattcaatcatcccgatgactgatttgagttccccactcctcacctcgacttttggcacaatatcatggagctgtgagactcaccgggctctagcttgctgtgtgttctcctccctatactgttttacctttcttcttggctgtgcttatttatgactctgtagttctcttcctgagccccaaacactagttctttgagtattaggtcatgctctttgtccaagactcaccccttccccaagtcactgtgggcttcatcctcatagtttatatggtgcaggcgtaactaagacttgtaaagcctgcaaagaccacccctgatgaagcaatcaacaagacttaatgaacacctgccttgtgtttagcatgcaaataagtgagtacttaaattatgaaatgccaatctaatcctactttcctcccagcaaaactatccaatgaactggtcaatcccagttagcaactgctatatttcttgaaaggcaaaaagttaagatgtcttgaaggctaaaaagattaataaggccttttcctcttcatcagactggtccaataacatgcagaagtgagtctagattagcaacaacctgaaactgcacagttgaggaaatgtccgcacctaatctgaatggatgagaggaatccaatttattaaatcattccaaaacagcataccttgacaaggaagtgacctgcaaagtttgtttatgctatttctccctccaaagtactagcagagatggaacatggatcctcttttgtcaacatctaagtttccagaagggactttgggttttacagtccaagcaacggcggttattatcatgtctcatcttattttccacggtaacataccagtttgcttcacggtgctgcatctgtgctgagaaacaaatgccaaagcagtcactttggagtccaggtgacaatgcagcatgttggagaaacaccggccaccaacgttagaaagaacccttcagcaaaccaatcaatgaaaagcagaaaaagtaacttcaaagcaggcatacactaaaatagctgtaagcttaaaagttccaaaagtaaatttcccttcctttgggaaagtttgttttgaaatatttgctttttaagttatacgtagtctccaggaaaaacacttgtctcataggaaaagcaagtgccctgtgctaaaattttattcccatcacgctaccttacaatccatagagtttggtcagaaagagttctttattatcccacagatcctctgccaaggaaccaggattattcctctcccggtgtcttttattatacttttcttcctgtcttaaatatcttccctcttcctaccactaatccaaacacaaggcctagcttcaaagacccactcgaggggcaaagtggtacctgcctgcctgcgaggagagtgtgtttggactggatcctggagattatctagctcaaatatgttccaactgtgctgaggagaccctttggagccttttcaaagagcattaaaatgggagagagaagagcagccatgtctgggggtagactttcccagaaagacactgcttgaaaaagtagtttccagagctttagggtgtaaaaacctaagttttgtaagacaaatggagtaacaaaggctgattagtaatagagtaccctgctaggcaaaggattgggtggccaggatgagctaacatcctcagatctggagcctcccaccctaggtccactggaggtcagcgggcagctgggaattggtctttctcttgctttgttctgtctctctgccgctgcataaggcagggtagttagcaggcaagtttctggatttccctgtctgcatttcccatctcctgatgtggccacactggggttaagaaaccttactgcatctgactttgacatacatcctggggatataaaattgtgtcatcagacttgtggcataagcactgttcacatgccctactggataagtcagtacccagagagtccactggaggcattggctaaacaatcacaggctgtgtcgtcttagaaactgctgacgttgacatcagtggtggtcagcacagctgggttttacccagaaaaataaattcctctttccaagcccacttgtctttatacttgtcatgtttacaaactgacatttaatcaccagttgattttcctatctgaaatgactctctatttttaaccctcaactctcattgtggagagagtgttaataatgccacaagttatttcaacaaaaacaccaatgacagttcatgttgcagaggatgtggagaaaggggaccacttctccactgctggtgggagtgccaacttgtacagccactttggatatcagtatggcgactcctcaaaaaaatgggaatgagtctaccacaagatccagcaattccactcttaggcatataccccaaagaagcacattcatacaacaaggacatctgttcaacaatgttcatagcagcactatttgtaatagccagaaactagaagcagcctagatgcccctcaaccaaagaatggatagagaaaatgtggtacatttacacaatggagtactactcagcagaaaaaaacaatggaatcttgaaattcgcaggaaaatggatggatctagaagaaaccattctgagcgaggtaacccaattgcaaaaaaacaaacatggtatgtgctcactcatatgcagattttagacatagagtaagaattaccagcctacaatccacactgccaaagaagctaataaacaaggaggtccctaagagagacatacatggtcccctggagaaggggagaggttcaagatctgctgagcaaactgggagcatgggaagggggggagggagctaggagaatgagaaaggggagaggaagagggataccgaggacatgagggagcagaaagtatgagtcaggggaagaataaacgataacaagaatggagataccataatagagggagacattttggtttacagagaaatcaggcactagggaaatgtctggagatctacaaagatgacaccagctaactatctcagcaatggaggagaggctaccttaaatgccctcccttgattatgagattgatgactgacttatatgccttcatccagcagctggtggaagtagaagcagatacccataactaatcacctatctgacgtggaacccagatgcagagaaggaccagtgaagagcacagaggtccagaccaggctggtgaaacacacagaaacagctgacctgaacatctgggaactcctgctccccagtttgatagctgaaataccagcatgggactgatacagaaccaaggaatatgggtttctgtgaggaaacctcagaaatctatgggacctcctgtagaagcccagtatttatccctagcataggagtggactttgggagcccattccatatagaggaatactccctgagccaagacacatgggggtgagcctaggccctaccccaaaggaaacgaaagactctgatgacaccctatggaaggcctcaccatccagggggagcagaaaagatatgtgacagataaggttttagttggggggagcgggtaggggaggatgggagggagaagggaactgggattgtcatgtaaaacaatcctgttcctaattcaaataaaaaaagttggaaaaaaaaaaaaacaagagaataggattctctcctcttaattttaaaaccatgagctttccctggttctgatccctttgagacatttcctctggctatcctctgcttttaaaaaacacattgaacagtatgttgctttttctgccttcatttttccctccccaggtccttctattggttctgaatgtccctatttgatagtgtaggcatcattgccttctctctctgcttccttgataggctctttggaggcttgaagaaaaatggcccccgtaggctcataggaggtggcactattaggaggtgtggccttattggaggaagtgtgtcattgggcatgtgctttgaagtttcaaatgtgcaagccagacccagcatcacagtctcttcctgctgcttgccgatttggatgtagaactctcagctgcctctccagcaccatgtctgtttgtatgccaccattctacctgccatgagggtaatcagctaaccctttgaactgttagccagccccaattaaatgttttcctttataagagttgctgtggtcgtgctgtctcttcacagcaataggaaccctaagactggctctttagttcactcacatccaggggtgcatatgactttcacccaatttttctaggagtgtttgctcagtagtgcttctagattaggacaagaaaaggatttttatggatgtcaaactttttgcctatatcctgctccccactccatcaccagggcaagttgcctgtccacacaatagaacatgcctacctggggcctgtgatcagaagcacttattcaaatttttctagttgagtctgcttccagatttgagtggtcacttctgggatttgcgaacacgctattgctgtggacggggcatgcccacaccctaaggtagggttaagcaggaccattagtgaggaggaggatgaaggcagaacctgaggcagtgacatgcttgaactgaacatgcagactggacttcccatgagtgctcccaagacctctgcagcacgtgacatggatgaggcttggggagaagaaacagaagagaggtgctttgccaaagctatccacacatttcagcacagatcctaacgcacacttgccttcaaggcagattggaaaacatgttcaccatgagggggattagcctgcattttactgaacaatttgcagcttgacttgtaatctttacatctgttgcatgtcatgtgtggtcctccatacaaattttgggctgagaatctactgatctcaggcagacttggaccttttcaacttaagggtgtccttctctttctgggtaactcacacatcaaagaaaatgtggaaagctcattgaaaatctgccaccccatgttaaaccactggtcatcttttagataatggcatcactaaaaccctaaaaccatagtccacctctgagccatgtcccagcctcagatacaaatggcaatccttgactgaaatcccgtctctgctttggctttcaagttccacccttcagctgacgccttttaatgtccccttgaatcttccctctttctgtccttaatcagctgtccacatattcaccagggttctgttcacattcttgcctgattccccacctccacccaactttctgaaaacaatttccctttcatcatttcaaggctatcccttgcctcccctgcccactttctttcctgtaattgtttttgtctctaattttgttatagacatccacatagccacatgaataagttccattgctcaaccagtccagacccctgggtcaattgcagagtatgagaatttataaaatttgtaagtcttcatactcacacacatactcaagctgccctagctggactgtcctttctttccttattctatacaaacctacttaactattgcagggcattcacccagtgaagtcttgcacagttataccatgacatcacttcttttgtgctcaactaacacatccatgccacgattctgatactatatgtgctttgtgtataaatgtcttcctgtctcttaaatgcaaatttttacatacagcggccccattctattcattcctgtatatattctgtgtgctttgcatattgtctcatatataataggagttttgtaaagatttgtttcaagagccaaaattaagcagagattttaataaatctctgtccaaatagaggttgctttactaaaaccttaaaacaggatgaaatgtgctcatttgtacaggggaatgagggctcctttgttctgccctagcccattctgacacttccaaacatttacctgatcaccagattctaagatttccctctccaaaatggctttaccatcctctctgaaagccagagaggtaatgtctgcaaagcctgtcaagaagctcagagcaaagacagagcactgctgtaagccttattacaaaggcaggtgtggcgttcaagctggttcccgcacctgtacagcctcccccttcagtgaagactcgcaggggtccgagtcactgatcacccatgcacagcgctccttagatggagaccatctggaattgcagagtttccactcccagcttctcttgtgttttgatcacctgccctgacataagcccggtgtcattccgtgtttatagtacgtctcctgggcagtttatggatctgtttctggcatttcctctaaaatcattttgagattcacagcatgaagctgggatgggggaatccaagttaggctgtttaattttctgtcaggggacttccatatccttttggctttgggaactggtgtcactaaaatgcaagatgtttatagaatacacatgctcaggcaagtcagtggagcccactcaacatctggataatcccaagaaggagaaaatgcctgcccatttcacaaaggactttcatgtactttgtctaacttcattcttttatttctgcgagatacatttcctgtcttacagattaaataaagattcacaaattgttatattctttcacagtctctctgagctagtaagaaacaggatggaacctatctgaccctaagtctgatgatctgtcatataatgagtgacatataggaagtagcaaaccaacagaaaaccaagaattagctgtgtttcagacaaaacatacatctttttcttggttgaggaattaggttgtttcaacatatataataagcatgcttgtgaaaaaaaaaagtatggtgcagtgaggaaaatatccaaattatagtgtttttgagattgttttcctattaatcagtgtttgtgataaacataacagcagacagtaggtaggaaaagtgtagaccaaaaaaagggaaggacttaccccagtccttaagctatgcttcacagcggccagaagggccgctccaccctgtgaaacagttgccatggcttacacactagcaaacagccccttaggcctgtgttccgcctcacacaatatgtttggctttcctcagaatagttatttagaacctttgtccctatttaatttagttatttttgtggatgtacagattctttaagcactctggacatgagtctctgatcagatatggtttctctcattctgtggactgttctgattactattgtcccagacaaagggtccacaagagaaaacgttagtgtgaggggtacctagtgaatgagcccatgttatcgcaggtcaaggaaagtgaggaactgctactaaatattctgtaagcttcaggtgaagtgtcgataatgtttttctctgagtatgcacattctcataccacagtacatagttcagatatgcgttatgaccagtacacaaaatgctattgaaacctcagctgtcgtcccaaagcacagggacctaaatattcacaagtagcagatctagagataaagggattttttaaaacttcttgttacctaaaagtaaattcctttgatttagcatgaattaggaaagaataatttaaataagtagttttagtaaagaaagaaaatagaacatgaaagaagactgacaattaggtaattctttttcccaatgcaaccagggagtttataggtggaaggcagagagacatgggcccaaatttctaaatgccaaggctttagttactagcattatcatgtaatatagaacatcactatattcagcctgaaggatgaaacaagacagggaacaacggggactttctggttttgtccctcatctttttctgtatgtcatgctactcctttcttcatttggtttactttggcattagccaaagacgagtcaatctgccattgtacttgctgagtctaggccagggtagagcaacatacgagctgcaggtcatcagtagatatctttctgtttcttaagttatcatatttatattcaatgtataaaacaatggacatcattatgtatttttatatataatgtgctttggtaacatcgacccattactctgtcttgacctctgctagtacttttcttcttcccaagtaataactcttctactgtcatttttaaaattaatttctggggagcgggaggaatggctcagcagttaacagtcctggctgctcttgcagaaggctctggctcagttcctagaacctacacctgtaggttctcagggatttcaactgtctgcaactctagttctgggggatctgacactctcttttggcctttgtgggtgctgcacacatatgacatacacacacatatattcaggtgctcaaacacacatataaaataaaaacaaacacatctttaaaaataatttctagattacacaggagagaaaatgtggcaatgcccctcctccttagagttgaatgaaactctattctgtatgtgtaatctcatttcctattccatacatctgttgacgggcatctatgtgggttccatgtcttggctgttgggaatagtgccacagtaaacatgcatgtgaaggtgtctctgtggtgtgcccacttagactccttcaggtttatacctaggggtggcatggttggatcatctggtggtactatttttagtttcttgaagaacctccatactgatttccataggagacacccactgtaatttacatacattctcactgtgagtatttatatccttcccagcatttggtattatttgtcactagccatcctgactggtgtgagaatctcaatgtagttttctgtgatggctaagggtattggatgttttttttttgtatgagtttattggacagagcccatttttaaaaaaaaaaatgtagaaggagggctatttcagagctgtctttcacacacttactttttgtccttatgtaggtcctttctacattttaggacagttagtcaacgtcgtaggcgcatcccacaatttatcactgaatgaatagcggcagaaatcaccgaaatgagacaatttcacctttcagtcccaatggatcttccttggccgatcctatgacacatcttctgtttctacaacatgtattcattttatgtctctttgttgaaagctcctccagccacttggaaagcatcagcccccctgccagaataattcaactcacgtgtgacagctaaaattaacacctctctctcttaattctatgttctcattctacccctctcaagaaacaaatccctgttgacagagaagagtttagcctgatttatatagctggctaccatttgtgaaagctgagttatttcttcccacagagtctgaaccaccgatgtaccatcaagttcacagacaacaaagagagccgagtaatatccagttggtcctcatctgagttcggtcttatcacagggcccgcccagctctcctccacatacacaggagtgtagcactcaaaacgggggaaaaaatggaacaagaaactcttcgtgtgggtgaggtgtgagctgaaaccaaatgagtaaaaagctacaagcatgcccatgcattattggtagaataaacttcctgtgtcaacaaaagagcccagttttccaaggcaaatgaatagattctgaaagtaatgggcttttcatggctgtaattaagaaaaatagggcaagaaacaagatcaatcttttaagggcatttggcctttaaaaccactttctgtaaaaatcacataaagtgaagtgtaagttaactctgcttctgccagttcagtggagtcaaatttaacctgaagacatctttcatttctatagctactttattatatttatacaaggctacaaaaaattaattgggtgatttaagtaagtcgactgtcacatatattatgagatctgcgtgtgtgtattatgaagtcctgctgaactgtaagtttggccaaggttgctagaagttacttagtgagcatgagcacacagactttcaataagccttcagtagggaaagcagtccctgacctcaaagaacacctctgttaggccagggagatgatgaagagtgtcaagtcgccagcctctgtgtgagggtggaacatgctgccagatcacgtgtgggaaatctgcagagctgggggtgggcgggtgccgaggtggccatgaggtgccaaatccatctcacggtatagaccagctaaggaacatggcaaaagtgctttcttcacaattggaaggaaagatggtaccaatatttgcagcatttagagtttgacctctccagtgcctatgctactccttccctgcatttgacaatcctcatttaatctgttagctcatagaacatctgagtgaggaagaaagctttaaaattacctgtggggaaccagcataggactgttccagaccctctgaacgaggaggtcagtttggagttctgggcaatctatggggcctctggtagtggatcagtattcacccctagtacacaaagggactttgggagcccactccacagagagggatactctctcagcctagacacacggggaaggcctaggccctgctccaaatgacatgacaagctttgaagatcccccatggaaggcctcgccctccctgaggagcaaaaaggggttgggatgggggtcagtgcagtggggggctggggaggaggggagggagagggaactgagattggcatgtaaaataagcttgtttctaatttaattaaaaagtgtaactttgtagaatatttttatctaatggtaatttaaaaaactacctgtgggagacaaggagtggcagtgcacacctcaagtcccagcatttgggaggcaggagcaagtagaactctgttagttcaaagccagcctgtctacatagtgagttccaggacagccatggctacatagagagagcctccctcaaaaacctgatgggatgaacggaggggtgaattactagtggttggagaaacacacagaactgccttgtattcttattccactgctcacaagctgggctgcattaggcaaatggcttgggtgcttaaagcactaatttttttagtctgttaaatgggaatgataaataatgtccacagagatgtctgtgagatgaaatgaagttatctctcaccattccctcagaattctgcctattacatttggcgagtccgtggtctttagccacaagaactgacttgggctaagctaaacagacaaggggtgctctggccagctatcagttaatgaacgagcagagaacggccctctggcaaagacccaaggaggtaggtgacaagcgtgtggtatgccaaggacacagaaacacagatgctgctggtgtgttcttgttaaaaatgagttattatttgtattgtgtacatgagtggggtgtgtggaggtgagaagacagctctccagctatgggctttcttcctccttgctgagataggggccctctcatttctgctgtgctgtacaccccaggctaacttgccagcaagcttccaagcaatttctctgtttcgtcctctcatctcaccatagacatgctcagattaacaatgcacctactgcattgggctttccgtgtggccttcggggacaaaaatctgctctgtgggcttgcatagctggtgcttcaacctcggatccacatctccagccccacccccagacacttgatgactctgtccttaattttcagcccctgcacattggctcatgaaaatctataactttcaggcaagcaaaacttatgaggcaacacagccgcatggacccttatgttacacaaatgtaaatatgtatttctggagtcctgtcatgcatcagagagcctgttggatatttaacaatacctgtaaataatcatacagtgagagaggctggagaaaggttcaagggttgggagagcttgctgtatatgcaaaagacagtctgacatatatattacaatctcctgtaactccagttcaagggatctgtcgccctcttttggcctccataagtactgcactcacatgcacaaacccatacagagtcaagagtttggctcctaagtaaattctgggttgtcatggcagcctgcttgtaagtccagcctcagagagcaggagcaagatgagccagaacacccagctctgcccttgactgggataatctgactcacagaaaaaggcagaagaacaagtaaccaaggtatgttcctgattatcaccccaaggcctccaccaccacataggtgcatgcacactctcacacaagcaaacactcacacacacaccacatacatatgaagagaagaaaaatgagggaaatacacacataccacaaatgcaatgaagacttataaaataatacaaagtcaataatatgcccagggcaatggctccgtgggtaaaggcatgtgatgctaagcctgacgtctgagttcaatccacaggacccacatcaagggggagagaggcaactcctacacgttgtgtgactgccacacgcaggccatggcagtcaacaaagcctagcacattaagttgaggtaggaccaagcccctccaggctgcatcaaggttgaacaagtcatcccaccatagggaatgggctccaaaaagctagctcatgctctagagatagattctggacaatttgattacaatgtaacccaatgtgtctttgggttaactctactccgtgtttttaaggctttttgaatctatacattcgttttccttcccaaacgagggaaatttctttattaatccatttttatttctttaaatagtccattttgaaaaatattaaatttattttaaattatcccttacttttacctctcttccttctaaaattttcataaagtgtattgacttctttcattctgagtagatatttcccctcttttcatgttgctagttaatcttcattgttaacttaactagatttagaaaatcataagaaaatgtgaggcccaactctgatgttgctgtaaggacatctccagggagggttaacagagggggcaaaccctactctgaattctgggagcccagaaggggcagaggagagagctagtacagtaatgtgcacactcatctctccttgctggtccccaacataaagagctgcctgtcttccgggtgcttccacgggtatgatggtgcctctcacgaatctttctggcttatgttgctttctcagtgattctgccacagtgttgcaaaagctagctaacaggcatgatgaagtcagcacaccgagttctctgttgagctctgttctgctcctaaatttatccacttcttcctgtacagcccccatgtctttgcatggtcatttccccctattacttgtctgactacagctgtctatcattgcgctttcttatgagctggtttctaaaattggttgctagcccattaaaaagatctcttctattggtagtcagttattgggtgtgttttcctttgaattttgtcctatttttctaattatgattcttggagctcctccctgtgtctgccgttagacaccccacacacctcccccagtctttacaggctggttttgaaagtggaagatttttcagcacccagtcttgttacagattttggagccattggcacaaactctgcttccacctcccgcctgtggagaaccccagtgctttgtattttctcaatctgatagaattgtgacagcctcactttctcagggcatctaaactatggctcagccaggagagccttttgtaggtagaggcagggtgaaagaacgggtgttcctccatctattcaccatcccagagaagtcctgagcttagattagctctctagacaaaggtgggctgcagggaaaatagacgcaagtaaactggaaactaggctgaaaattcctgatagaaccacaaaatgcgcccctcttatttccttgcttccatttaatgactctcaattcttgctatgtatatgaactatccaaagaaactcaaaattctactctctgaggcctattccaagacattgtgttaatttatctcagaacagattccaggcattcattggtgtttggctaaaatacccttggaattcctaatgggcagccatagatgatactgttgtctgcagtgaatcttcaattcttctgaaaacctgtgtaatacagaatattatttcttctcatgctgtctcacttggcattgcactgagaatcaactcagttttcgaagctcccttgcaaacgaactcactgatcctcaacagccctgctgctatcgaccaatccatgggggatttttaaatatggcatcaaaaattcaatccatacaaggaaaagtaatatagacatcaccaaaatttagaacttatgtttcccaaaaggcaatatcatgtaaaaagacaagctatacacaacaagaaaatatttgcaaataaaacatataacaaaaaaattgtacccaaaatatgtaacaatctccaactactttcaacaaagaaacagacacttgtcaagtaaaatttgaaagcccctccagacaagcagtcatgaagaaaatgtggtttgggaactgtagctatggtgtcgctgctgttgctcttgtagaggaccagagtttggccccagtgcccacatgatggctcacaaatgcctgtccctccagctccgggtgcccccacaccctcttctgctctctgagggcaccttgcacacttggctcacagacaaagggccacacgcagagacacacataaaattattacattaatattaaattcagaaaagggaaatgtgaaccaagcttctgtgggacaccagccttttagtaatagctctgtctcctcatgagtttggggacagggaaggtgcaggtggcactggggaaccgtttttttttagcataatccatctaactacctaattagctagctaactaacttaactaacttcctcagaaaggaagacagagtttctagcttccattattatcttgtcacaatggctacaggaaagacttagagaaaataattatgttctactacaaattattttgttttcctggaatgtatgtttgcatcaattttaatactgtgttcctatccataagaaaccacaagggggggacggctaagtatgcagtaatggcccctcccctcaacatatgtttttgattttaacttgggttctgcttggatgaatgatggagcatgactctgcagcctcaattttttttttaaggaggccgattgttttctgccacaaacaagcttcataaaacaaagctaatctataccctattgagcaaaagtatctctttcctcataaacacaaagttcaaatgatttgtgcaaagtgcacgcaactgacagctgggtttcagatctttttgtttgcttttaaagcagagcatggccttccataagccaggcctgagtgtgcactttatgaagcctttttctgtaaagcatttgcttgcagcagcctcctttgttcgttttcgcaatctccatccaagttgcaaatcaatggatctgtcatcatttctcagaatgtgttgttttcaacatgacccgctgattttcccaagtactcactgttattgcggagtcatggtagcgtggcccagcaacccctttgcttgctttttggccactgaatcctctgcctttcctttgacctccacccaagtatacagccttgcatcattcgtttttccagctctctctctctctctctctctctctctctctctctctctctctctctctcgactcatgtccaaggaatttaacttgcatttcttgacttctcccaagaataagaacagctactggaaagtgctggctctgcagagtgaaatcctggtagcataactccctcacactcatagctacctcactatcagtttcctcaaaacatggcccctaaagttctcattcaccacacatagagctattgggaaaatcaaatgagatcaaagctgtggtgttactcgtgttctgcagaggcaaaaaaacagatatcttcattatagttttctcctttatttgactcagctttgttacacagctaaacaacaaactgaatgaattttaatggatggatggatggatggatgattagaaaggtgtgatacctactttacccatcccccaagcactcttaggtatcatctctagaaactatgaaccttgacttttatcctggttacacacagggatgaacagagtgtttctttaagactataatgaccaaaagacacatctcagagttatacaatagaaactctggaggcagaaatcaagactctgtgttcttaatactgaatgtggccaatgatggaaattatatctcggctgctgctttagctgtgcctgtcactgaacccagatggttcactaatgttgcctgggagagcaggcagtcatttgaggggacacagtagttcatgatggggaaggcctgaaggttttgtaatgtgggattaagcttgtcatatcgtctctacagtcaagaagcaaagggaaagatcagctcagtggcaagcaggatgtcaccctgaagagccagactccaatagcccagttcctccactgaggccctgctttctaaaggttctatagctgccacaaaacagcaccacctaccggaaagccagtgttacaacaagtgagcctgtgcagaacatcccacattcaaaccacaataggtcctaatcacaaccaggaccttccccaaggcattctgcaggttcatctctcctctaggacctcagactcttctcaccaaggaatcatcatctttggcaagtcatgtttatttaattttgttttgtgttgcatcaggagcttcatctattacctgtcacatacaataagcacttaataaatgttgaattaaatggacaagaattgtaaattgttgcagagcccctcagataacttttcctattattctgatcagacaaaacttgccacagcctgttgggcaaagatgatatagtaaaaactgaattcttgcttgttctgaatagttacactattggctgtgaaagatactaatgtcaggctttatctatggtaaagtattttcaggatcaatcttgcaagttacattggaataatattttattgaaaataaacagaaagaaaaacatgcatttgggtaactaaattattctgtagagccctcaaattgaatgaatacaacccaaaccagttggagcccactttcctctctacaaagcatttcctgtcataccctggctcttgctagtgcacactttctgttctctccagctcagactagctgccagtaccacaggtccagtaggatctgttatcaggcatgttcctctttccagtgataaaagagttcactgaacctgccctaggagggaagggatgctttaggagattcaggtgattggcagctcattgaggctaagttcacagaattatcctttgctctgggaatgatgcccagaatcctactcccaactggtccacccaagaagtgaaagcctgtgccaaaacagagaagctgcttcagcaatgtccagaaacagccctgtcacggtctggtccactcagtcagaccaaggatgacatctgctagcgtctgtcagtatgattccattccaaaccttctctgggtgtcactgacttacaaaagctatggtccttgtggtggtttgaatggaaaatgttcttccaggcttatatacttgcgtatgttgtctccagtcagtggcactgtgtttgtgaagttatagaagctttaggaggtggagccttgctggaggaagcacttcactggggtcagggtttgagaatctagtatcttacccacttgtagttttccctctttttcctgagagtggataaagatgtgtgatgggggagggccttctgtgtatgtgattgtcttattggttgataaataaagtactgttggccaataggaaaacaagatgggtgggactaggagtcaaggaggattctgggaaaggtaggagaaagtgcagaatcaccatgtgagccggggaagacaggacgcttcttctggtgtctgataagataagtcttataaaaaatatagatttatgataattaagactgggctagcaaatgagaaatcctagtcattggccaagcagcatttgtatccaatataattctctgtgtgttactttggaccataatgtggcatcgggcagaacttgggtggcctggcggaaaatgctcatgtgacagcaagtctctactccaggcatctgcagccatgcctcctctgcaattatggatgcctgggaccataagcccaaataagctatatcttgtacaggttgttttgcgtccttgcatttttttttcaatcaggggatcaagtaactaattcagactctaaagctgtccatttaggagtcagacaactctaccaaagtctgaaatgtgttctgtcttcatcagttgagattcaagggaagatcacagcctggagttagccttgatgccttaatgccttaagcctactaactgaaatgtccagggtatgagaaacaaggctcatcacttcacagtgagagaactgaagacccaaagcattaaaagggaagaagtttgtcttatgaccttgcaaagtcaggtgccggcccagaacggcaaactcaccaacagaggtgggggccatagccacagccacagatggtgatcctttcatttctcccatcatctaggtcttgtcttatccgaatttcccttacatttgtccttttgctacaaaaactgtgcatggattcacatggtcacatctggaagttgttaggaaatcttggaagtcaggcattttctactgtaaagtgtgagtttgggtggaggcacagtacctagactatcagagctgagggggtggccagcctagcagagtttgggtaggaggtagtataacaggttgttacctggatccagtgatccaggttgttaatctggatctaagctggttcaatgcacctttgaacttgaactattggattttattcatgcattggatttgcccccagcatgtccaaagccacctaaacacagcctccttggtgacctcccagaaatttgtgttaaatctccataattatgccagggcttcaatttcttgtttctcttctacttctaccaccaagactcctgctttggtctgaagggcaccatcctggcatacaactggagcattccattcaattctaacaagagccataaggctggatattcatggctggccagagatctgacatctcagagaccttgttaactgatcgacccaagacaaccgtttcgtccagtgaatcagactctttagcctcctagtgttaacatagatggtatcacataatccttgtgcacctggagtatgctggccagttaatgtccccagtcttacttctacatgttccaggggaccacaggtaaggtctcaacatacttttttcccaggattgtgtaagttacatctctacactatagctatctattgcattccccttttgagtgtgaggcagagtttcctataggccaagccaacctgaaactcactatgtatacaagcaatgacctggactcttccctctgcctcctgagtgctgcgattgtaggtgtgtgcaaccatgcttagtccatgtggtgctggaggttaaaggtcctagggcttggtgcacattccttatggactctggcaactgggctccatcccaagatgctatgcattctttgacccaacataaatttccctgtgcatctatgctcatccgtgttatttgatgttcataagaggtacatttatcctaccatccgtctcccagtattctttaaaataccattcctacaaagtcttcattaaagtcctgaagcttcctgccactcagcacacgctttggatatggagcttctcagcctgccctggaatattttgttctcatcccccaaagactaagacctcttcaataactggcttaacccttaacagctccttcctcactcccagctaagaccatctgtgccctataaaacatgtctctggggcagcttcagcataacatggactggatccagaatccaccccattcttttatccaaatcccctgctctagtttaagactcatgggtctcatatccaagtgttttattcctcgatatttctgtcttaccctttaaggttgagccctcacatgactcttaattttgactcggtctttgcatctatttgaatgctttgcttttacatattctggccagaaacaccctgcccagtctctagggactgtaactgaggtattgcacatcacagcaaggagttttgacaaagcaaataaatgcatctgatgtttatgaattttttccaatgaaggagaataatggttccctctctctaaaatctagtttcaggttttatactctgtagtgtcacacagtaagactttgctatccaaaccatgatttccagccaggccgaatgatccaggaataaaacaacatgagaaaacatgaaaacaagggacatattatgatataattatctgatattagaaagatgtgagcagtaggaaccagctggggaaatgcccctgtcattatccccccccatagtgccctcgccttcacactaaccttcctggactctacacacatggttttcatgggccccagagtctgctataaactctgcccagaacagcctctacttcattttttttctcaatcatgttatttcctctttcaggtttctggcaagtaccatctcctcctggaattccttcttagcccatatttggatacagtgtccctcttgttaaagacacttcttgttaatttgatcaaaattctcactagactttaaattcaattcagacaggggctgggagtctagatagatacatgagcatctcacaaaccatggtacagcttttatttcatgctcagtaagtctgtattgaatgactatctgagcatcaatggcatgtatcattaactaactacgtagtcatccgtagggaatactggtgtgtaggaagatggaatctaggaggttgaaaacactggagggtgttggcagagggtgctgtataccacacagcatgggtctggaaatgtgactgtggcaacgagggaatgaagaaaggatgggcagtaaagaaatgacagacatatggacactgaaaagctggggtcaggtgagctgtatacaccctgatggaaattcaccacctatggctgcaaccagtaacctcagtgcattgattatatacagcgtggggtgagggggtggctagtctcagtgggggggtctctgtaggtcagcagtctcaggctgtagtcgtcagggagaagcaagctgctagtttttgcacacactgctcagcccttcataaatactcgtacatggacataggaaggccttgcttttctgaacctggaaaatgctttgccaatttccaatgagtctgattctgttgtgctagaaagaacaagaaaataaagctccacaagatgaataatgatgagcagacagacaagaatcctgtgggtgagaggaccaacaagtacaccagtagctaactgcatctagggggacaggacagattacagggtcgcacaatgtgtgcgcagaagacatcttgaagggttgtgttgtcagaaatgtgttgtaatgtgtcctcatttgctttgtcttgctgtgacataacaccaagaccaaaagctacttacatgaggtagggtttatttggctttaaggtacaagccagagactccataacggcatggaaagcttggcaggaggcagcccccataggaagctgagaaagaatacaggaagtagagagagctaactggaagtagagtgaggccatgctccctcaaatcctgtccccactaatatatgtccttcagtgagactctgcctcctaagtattccataacttcccccaaaacagcaccgcagacgagggaccaagtgattagaaacctgagcctatgggggacagttctcatccaaaccaccacaggggatggtatcacatacaaacatcatagactatattaacacaagcccagatgacgctgttcaacagtacagcatgaccttcaactaaacagagatacagttaccacagaatgggttctgtggcgatattttgtttacagtctaacaaataaaacttgcctgaagatgagagtgcaaagctagccacactagtcagccatacaggccaggctgtggtggtacacacctttaatcccaacagccacactagttagccatagaagctgggtggtagtgcacgcctttaatcccagcacgagagaggaatataaggtgggtggagacaggagtgcagggtattcagtctgcagtcacactgagaacaggatcaccccggccttggtagaggagaactttctagtggcttggctgctttgcttttgtgatcttcagcttgaaccccaatatctgtctctgggtttttattatttgtgctccagggttctcagctaatcctctctagaaacaccatgaatacagtcaagttgtcactgaagccaggccattactaactacccatgagaaaacaactatacatttacaaatccaaccatctgtacgatatgaaaagtgatccgtgatcttgttcctgctgagtccaccagaggaggatgacactatctctatgaatggcattctttattttattttaaaacaccacagtaaaaaggcatttcaggaaacattgctataagaattaaagtccttgctctcaaacccagttttataatagatagatggtgtgtcccgagtgtggggactcacatcatcaatcctagaaccggagaggctgagtcaggagacactagagctcaaggccattccgggcctagtaataagacagacagtgtcttaaaacagaaaaaacaatataaaggagtaggaagccatagagaaagtagagaaggaaaataaaggaaagcaaatccaaaaaccataattaaaaagagaaacacatttcacctaacctttaaaatataaatgaggttgaaataaccatagaagtcaagaagcaagaaagggcccacgaggcagtggggggatgagggggtagggtaccaggaagagactttaagggttgagggcgtaggacatacatgtgctatgaaatcagatggggggtttattgagggttaaaggttatatgaggactggggtggggatagggaggggagatatgggatagtccagactacggctgtattgaaatgcttatggaaacacacactttgtatgttcattttaaaaaatatgatttatttttaaaaggaatttgaacataggtatcctgcattggcaaacaacactctctgcccaagatatgggttattaaatgaaaatatccgtatgagttactggttggagacaggggagagttggagacaggacacagacttccaaaacagcccaggctgttgctgctgttcttggctgcccgccatatctagatggaaagaacttattgatagaggaacaacatacactgtaactagacgtgggagaccctattgataaagacacaaacacatgccatagctagatgcagagatcttattggtaaagacacaacacatgccatagctagatgcagagatcttattggtaaagacacaacataccttggctacaagacatggagaaatcaagctagaactgacttgaaaactacttgcctgctgacatgctgacaggcattccatcatggcagaaagaatgatgctggccgctaggagagcgctttatgtcctggagagggagatgcaggaggagagaagccagcactgaacatctgcttctggagaatttggggaaggtttgaaagttgggtggtagaagcaaaagccacactgaagtggctggcaaccgataaggaggcgcacaccaccccggggttaataccttcatcattaggagatttacagcaggctgcggtgctgaatctgaacactcctgatgtaacaaaagggattacttaaaaggatcaataaaataaccccttaaaacaatagagcaaacatattccacatgttttgggggaaataaaaacaaaattagttaagatttaagcttgtttaggtctcttatgccaggttgattagtaaaaattcaagacagaagtaaacattattcttctaaagtagggagaatttacaaatcaaaaggttgcacttatgagagagagagagagatagatagagagagagagagagagagagagagagagagagagagagctggcagtcttcttgtttagtgtagatacccacaaggggtgtgtgtgtgtgtgtgtgtgtgtgtgtgtgtgtgtgtgtgtgtgtgtgtgtgtgtgtgtgtgtgtgtgtgtgtgtgtgtgtgtactacaattaattttctataatactaatcttattacaaccaagtttcctctttaggctttataaatatatctttttttatttagaaacaatcttattttacacatcaattccctccactccctctccctcccatcctgccatgcccctcccaccgcctccaatctacccctaccccacttcccaaggatagtgaggccttccctggggatcatcaaagtctgtcacatcatttgggggagggcccaggccctgttctgtgtatctgggctgaaatagtatccctccatagggaatgggctcccgaagtccatttgtgcactagggataaatattggttccactgttagaggtcccatagactgcccaggcctcctagttggcacccacattcaagagggcttggttcagtccaatgctggttccccagctttatgactggagtccctgtgttctctctaggtcaggtaagtgggttctgtaggcttcttcaacatggtcttgactcctttgctcatctctcctgcctctctacaactggattccaggggtatgtctcagtgcttagctgtaggtgcctgcttctgcttcgatcagctactggatgaaggctctaggatggcaattaaggtagtcatcaatctcattataggggaagggcatcaaaggcggcctctccaatactgcctagattcttagttgaagtcatctttgtgggtctctggacatttccctagtgccaaatttctctttaaacctatactggctccctctattaaggtatctcttttcttgttctcctttattcctcccctgactcagtcttcctcattcctcttgttctcctcccccttataaatatatcttaatgaatctaaatgtataagttaagacattttagtaatataacaacaagttatgctataaaacatatcctataccattaaaatagatattaactcatatagacatgcatggtgatcaaagaaagcagaaacctaagtccttggcataaatgaactcatttctttcctggaagaagttacccccatctgataagtgagaacacagaggcctgtcagcttctttgaggctctctaggtcacagagcttagtgctttggcttgagttgggacctctggtgaccctggactttcaaccattatgttacatagccattgcataaatgggagcatgcgtgcacacttgtgaaatctcagtttaaagtatgaaaagtagcatgctatatgagaagaggaggctgtgtctcacttgcattggtgagagtcagaggggaaactaggaaagtcttacttggaagccgatgcagagtttgctgaagtgctcaattggaacaagacatttcttgtagaaatataaactcatggtggtgtgagaagccatgggttaggggagacaaagataatgagcaggtgtctgtggtacgcacagcagaggagagagtgcgtgtgtgttaggtatgtgtgtgtgtgagtgtataggcatgtgtaaaggacagaaatcagcactggttatcttttaagttgctctctgcctgatttttttgaaccaggtttcctcactgtaactggagctcacccattcagctcaagtggctggccaatggtcagcagagacccaactaccaatctctaccactggtgttatggggctattgtctctatgtccagcttctaggctgttgtctctatgtccagcttttaccagtctctagcactagtatcaggaagctgttttgtctctgtgtccagcttctattcaggtctcaggcttgtgtgagcactgtactggttgagccatctccctggctctgcatttatttattttcatagcttcttggagatgacgtgagtatttatttgtcacatttaacccctttaatgtgtaatgagaagtatttcactcaaatgcagcagactgccctattatctttaagagggagcagaaaataactgcttgttgtcttggaggtaaactttatcacaatggatacagtgattacctgatatttcaaattaagcaaaagagatagaatgctgcactcagttaatcagtttgagctaaaagttaaggatgtaaaagttaatgagttttaaacctatctgcataattcagtcttagaaatattccattttcttattctttgttctattaaatcttgttcgttttcacaatcccatttttaaatgatttgaacaataattaatatagcataatatggcctattttctcaccaacatttttaagacagggttcctctgtgtttcttgtgttctctctttgctattgtttgcctgactgattgttttccagagagatacagaaggcatggagttgggtgagtgggaggtggggaggatctgggaggacctgggagagaggaaagaggagttgtgggaaggtaaatcataatcaaaatccattcacccaggatgacccattagcccaggatgacccattcgcccaggatgaccccgaacttgtgtcctctagcctctaccttccaagtgctgtgattacagacactgtgggtgccaccgcacccaatttatggggtgtaactcaggactccacctgctaggcaagcttcctataaactgagctactacctccagcccagatccagctcagggtagcctcaaactcctgcctgcctgggctacttcatctcttcctactggcatgtaccgccatatctacctatagtctttagtaagaatcaaacacagataacactatggtgaagatagattattaatataggttaagtatcaatgtatattaagatcacccattaacattttaagatctgtcagttcttgtgtgtaaaaatgctaagggctttagatgcttcttttaagacatattcttcttttaagattatattcttagtacagtggttgaaaggctttgaaatctcatctaagaatacataatgttctggtgaacagttggtgcccagaattaaataaattagacagttgatattgagatttacaaaatttaattctcatttcccatcactccctgaaagtctgccaatacaccacttctatttaactcagtgatgcattcctggaatgaaactggacctcggttttgaaagcaagatatgggatgtgatctctcaatttaggttctcacactgtttggaatactccttaccaccagtgcttccctgcagctgcttctctgagcaatatggcctctatgcagggtcttctggatttgcttgccttcctaagtacatccctggtgctgggcactctgggcgtagaatcggagttatttctgtctttggaaagctcctagctcatgattcacagatacttcccccaaccacctctcaacattgcctctgaatgacaaattccacagttgtgcaatagtaataataaacaaacaaaataacccaacctcttgtctgattctctccacagattgggaattgaagggttccatgcagtcactctgcagagctgccacaagaccttggtcagaccttgccattggaccttcctagcacacctttaagcaactagtcccaacaatgtagtttccatcttactgtcatctctctatggagatgagccaatcagaacatgtatgtctaggaccgccagtttgcctagatgtcaattaatgacagacctttgtaaataccatgaagtggacagtttgttgaggaagatctgttgtctgacaagggtctacttgttggtttgtagtgtcatcttacctgtacagttgatgaaaacacaaacaggctctccgggtctcttttattacactattcccaacctcgagcactatcacattagggttctatcccaatcctacccatgaatctgggtaggatatcaacacatgttcttggaatcccctgtggtctcctaaaactcaaatgcttcttatgtacaacgtgcatccattacatttcaacagccctaactcacttcaaccctaatgctgaatccagcttcttgtccatctatcccctcaacgagacgtgaataacacaagaggcacaattcatgtaacacacaatttaccttcagcgtatgaaatgagacaagttatgtgacagcaagcacaggattaatgttcccatccaaagaggagaaaaggcaagaaaaacagggatgactagttctaagcaaggccccaaccgagtaaggtaagccccgtgagactgtaaagccagagaataatcctcttggttcaacgtcctgccttctaggcctattagcacaacactctataatttgactggttcttgcttacagcacagctttctgcagaaggctaccattgtgggttttcagtcagataaaggttctaggttctatagtccaagtgtccattctgtccctgaattactatacccccacaaagggactcaaatccagaaactgtctctatcataggcagggccttggttggcggatattgtcagtctaagatgctgcatttgaaaaacaaaaaacgagataagaaggaaatttgtccttgcaggaccactggaccattgtattgttcggtggagttgagtacaagaaccttatatgtctttaaattagaagtagttctttatgagaatattttagtaataatgtactcttcctgatacttaaggggtacatgtctttgccttttcacatgcctttgcataaactacagttctgggcgattctacacaaaataggaaatagatacacagttaattccccatctcctcatcgtgcctccattctgtatgtacatgcagggatgtttctgcatgcatgcaaatgtttgtgtgcaggtgtgtaccccaatgcatgatcacatggaggccagaagtctacattggatttgtttttatactgttctccaccttatcttccaaaccaaatttgttattaagttttaacagtatcacacttgtttaaagtgcactgtgatcacactcactgtccactgtcctctcaaacccctgcccttcctctgatccactttctcccccccacggatcccccttcctgtgtctgactcatagcaatgaaggagctgaggcacgtgtgtttgggggaggagcctaacggagggatagcagaacacacccactatgaaagcacaaggaggggatcatggggaaggagatgctaaatgacagatggacataaagagtaggggaagcataaggatatggaagggagtcacccgaagtcagagacagatgaacaacgccatagagaaacaactttataaactaacccttcctgtgtgagacggactctcaaagcagttttaattcgcatttctatggtggccaaggatgttgagcacttaaaaaaatgttcagccactgtttttacttcttccgttgagaacactgttcagtactatagactctccttttgttgaagtatttgttgttatgatgtttggatttggagttgtttttatatcttatataccaattctctgtcagaaatacagctaacaaagattttcctttgttctgtagatggcctcatcactcagttgaccctttcctttgctatacaaaccccttttaattctacaatgcaccattttatccattgttggtcatatttcctgagcaagcagaattccattccaaaagtccttacctcttcctatgtcttgtggtgtacattctcctttgggtttcagaaccaagatcttaaaatccacatggagacaaaaaagatcccaaatggaaaaagcagtcctgagtaagaggaccattgcaggagtgaggcatacatgtcatacaaatcacactacagagacacagtcataaaatcagcatggcacaggacaaaatcagactccgagatcaatgaaatagaacagaagacacagatatgagtctagataattacagacagacacctgtgggggggttgtcttcctttctgtttttaaaagatgccaaaaatacacattggagaaagaacattatcttcaataaatgacactgggaaagtcaggtagctacctgcagaagaatgaactaatcaacagctctcacactccacaaaacttagctctgtgaaatagcttcgaatctgctatagtagcctagcattgttcttttcactaaggatagcattgtgtatcccagtcttttgtattccgtaatatgaattttaggattttttttctatttctgtgaagatgtcatgagaattttgattaagattgcattggatctttaaattacactttgtggtctggtcattttcatgatattaattctttaacccgtggacatgtttctatctcctagtgtcttcctcaattgctttcttcagagttttgaaatcttcattgtagaatatttctcttcctttgttggatttattgtgatacatactatatatgcactattgtgaatgccattgtttatccaatttatttctcagtgtgttaggctaccagcatttacatgttaattttgtgacctgtcagttgtaggagttgtctgtctaccttagttcttgagacaggatctttcactgagccttaggttaccattttggcttgactggctggccagcaagcccttgggtctggggtggtggggcaattgcctcttccactcctagctctgggattacaggggagcatcactatcacccagcttttatctggatcatggggatccaaacaagtcttcatgatcctttagctagaactttacatatgaagtcatctccagagtccccacccccttgttttggtggccttggggaactaactcatgatcctatgcatgctaagtaaatcactacaattgagctccaccctaatccctcattcattatgtattcacattatggcctttcgtgaaattataaatagtcactagaaaaccataacttaccaatgacaaaatccaattaacccacctgtctcttcccggtggagactactggtagaaatgccatattcagatttacatgaacgataatttctgaatatctttagagtgaaaaatgatcatcttctgaaatatactcttgcatgaatattaactgtgtgaattacacgtttcctttaatagactcttctatgaattagaaaatcaagtctaaaaaacccaaaactactacatataattaaaccatggtaaaaatataaaatgcatccaatttcataataacttaacctgggggtatgttctacccttgaaggcatgatctacatattttatttatttttaaaactgcttgaatcctgggcatgtaagggaagtactttaaacaaaactaaataatgataaatgaatctaaagaatatgttcccttaaaatgatttaaatttaatatactgaataaattcaacctcaacatttcaaaatttagcttctttgtaattggtccaaattccctaaggttttaagtatatttgaattattctgtgatgaatttgattacttgagattaaagaactagattggtaccctcattgtaatacattacaacgatctgggctctacacatcatataaaaatgaaagaataaggaaattgagaaaacacatgattacagaagaataaactggaacaggcttaccagaaaatgttaaaatattttgctggatttgggttttgtaaaattcttaaatatgtttggcctaacacatttccctttaattcccttaatatgccctgtggatttccacagaaatttgaaccatatgtttcagattcgtttatacttaactcatcaacatgtttggggagaataatgtggagcacaaaaccctcaggaacgctttttgtgggctctttcattttacttggtaaacaactggaacctgaacccagaaatcctgggtcttcatttaatgctcaaattgcaacaaggataagggagctctgaacgggatggggcacgctctgccttggatgatgcctcgctccaaaccttgcagctgggaggaattactttgatagttcactccactcttgtcacttttattttagagtttgtaagtaagtctttgatggtgcagaacttgtggtgtccctgctcagtgacaccctgtcagctctatttgattttgctctttgagaataatgctgtacctgctgtaagcttgctccgaaataaaagaattaagcaaagcagttcaaaaaccttgctcatgcactaaccactacagtttgtttgcatgtgcagacagaatggaacagagacaaaaattactacctggctttctctggtgtctgttggaatgagtagaaaattatttaatggctgtttttacaacttgattattctcgtctgtctccacatctttgatatagcacgggacccatctatttcctttctctgtcagcttaagggaatgaaccctaagattcatgtctgggtggttggttaatggctcagcatgatgaacactggctgtttgttttctgccacctatcactctgcaaatctttattcttctcattaggatggctggcatctcagtgtttgggcaattagcaccccagtcactgtcttcctcctggacattccacaggagctgtagatctgcttctccgtggatttttattgacaaagatccttgagctctgtaaaacatgacagagaatctgctcatggtgctacctgctgtgtctcatgcccggcaccactatctcctcatggtgctacctgctgtgtctcatgcccggcaccactatctcctctattactgaattcattccctccctgttacttctaaaaaatcctttggaaacaagatctggggtctgaaagaattcccttcctcctgctgcccattgcaaattagaggtaaaagccctacctctaatttacctctaatatatatattggaggtaaattatatataatataatatatatataatattatatatatgggatgaaaaaacagaggattagcagaccgaatgagaagagtccaaaaagaaactctgtaggagagagacatatctctttcaccatctcccccaggaattaaagagagatgaaccagatatgtgtgatatttagaggaagaaaggaaaaagggaagagagagagagagagagagagagagagagagagagaaagagtcatttttcaatctacagtataaaaatctgccttctgagtttttccataaacaaaggtcctgataatttctttttatcaaagtagagtggaaagtgtaaggggtttttgtgtaagggtttttgtgtgtggttacagggagggaaactgcaggaacagggcctgagcacctagtttagtaaacattcttggcccaaggtgttgtagaaaataaggcaccacggatggaaatatattgccctccacttataatcattaaggacttttatttccctgtctccataaatcagaatgccctattaaaataaaattctgtgagtcccccgcaactccatcgtagaaataagagtgttctagaacatcaagaagttactggtttcatatctgtctttgaaacattcctttatagaaatattgtataatctagttgaggcacttcactgtgcaggcatatagtagacacatgacacacacatatcgtgggagggtggctccagaacctttcgtttgttatcggttttgctttaatgaagagatgtaggatcagagtatgtttgcggctcacccacagacttgtcaaaagctacccggggattgtaaccatggaactgggacacaggcctgttaccactcagctgcttcctgtggcagaacttattttggtctctaattctctctcttttttccttttattgaagtgctgggaattaaacacgactcctgagctatattgacagatacactttttcattttgagattaaagtagatattgcctgaagcccattacaagaataccaattaggtttttaatgcatgcttggaaataatgacaactttggggctaagaagatagaccagtcagtcaagtccttgccatccaagcatgaatacctgactatgattcattgaacccatgtgtaaggtttgtgtggtgccacacacttacaatcccagtgctaggagttagagaccagtagattcctggggtcactggccaaccagcttgaatctacatggagagttccagatcaatgagatatcatatctcagtaaacaagaggtatgcacctgagagaagaaacatgaggtgggtctctagccactacacacatgttgaccttcacacatacaaacctatatatacacatacataacacatataacaaacatatatgtgtgtatatatgcacacatacatacatacacataacacattcatctaaagccatacacaaaatatatatacatacatacatatatacacatacaaacatggatatactcacatacatatatatacatacacatacatactcaatatatatacacatgcacacacacacacacaaacatatacacatgcactcacaaaacacacacaggtgcatacattacacacacacacgcacacacattcatgaatactcatagacatacatgcatacacatgcaaaaaaggaaatttcacttccacagtggtcatcaactatacaagttatgaggataaagacaaagagcaatagaaatcttattctatttctttttttctttaaggatttttctttttatataatttagtgtgtgtgtgtgtgtgtgtgtgtgtgtgtgtgtgtgtgtgtgtgcgtgcgtgcgcgcgcgtgcacatgtaagcacacaagaatgtgtatgtagaggctccttactagacagaaacttaccaaatagactatcgtgaccggccagtgagcctccgggatctgcctgtcctttcccagccctgggattgcaagcagatcaccattctaactttgtaagtgagttctggatgtctacttcaggtctgtgtttgcagagacgcaaagatggggctttgtgatgggttcttaaatccacacaaccaatctggttctgaacgataataccatcacttctttcaaagagtagagtatcattcattcttcacaaaaatcaagagatgtccgtgccttatctagcttctcatagttttggtgttttggtgaacaaaggtggcatttgattcattttaggtcctctaaagttcaagtagagtttttcacagtctccaaacatgtactgagtgcagacatgagggactgagtgaatagcaacacagagcaggagctaaccccaatctagatgctccatttgcaaagttcaccgtgcactgattgtgtccctcactcgtgtgcagtgttggtcaagaacctctggacccatccaaacttctaaaatcttttatcagttattagcaagcacaccaagagatctgtgagacccaagctttccctttgcttctgacttttgtttagaatactatttgtatccccaactcacgggaatttgacagtagaggatttaccatagtaatgaataattagagactatccagaaatagcaactaatattagccacaatgtattaagcacttttgacatacagcattttatagatttatagtgatatagttcatttaataccctcactagtccctatttattaggtactattatttggtcgatttcataggtaaggaaactgaaactcaagaagggtaatttgctcactcctggctacacaattagtaagtggaagggctaagtttgaagtctgagcactgtggacttaagtccacaggcttggcaatgaaactaacttgcctgtagaaaaaaaatgatggagatcaaagttctgggtttggagagaaagctctgtggctaaagaacttgttgtacaaacagcaagtagaagattggagctagatctccaggaaggagtggtggtctacacagtgggaaattccagcatgctggaaaagtgaagactgaaggtccctggagcaagctctccatctagtcaagccatattcatcatctccgggttcagttgagagacctcaataaggtggagagaaatccaggaagacgcctgacaccagccatgcatatcctcatgcacatgctcacacctgcacacacaccgcacacacacacacacacacacacacacacacacacacacacacacacacacacacactccatgcacaaacacatgagaaaagtaaaaggaagatcaaatctctggagagttcaaaggagaaaaagaccattatgatgccattaaaaagatttctgggaaatgaatgaaatgcgtgtacagcagtgaactactaggagtctctgagagctttttcctgaaccaccgttgttcagtagtgcttatccctacactctgggcataatggtacctctcagagccaacgtcatccccagtacaccccagcacaaagtgtcactctgggaatttcaggtttcattgtaagtggacagaatttaaagtgcaccaggcgaggaatagattcatggggacaaattgaggatttcatgtgatacctaaaagaagagttacaatttgtgagaaatgtccattatcctcttctttactgtgggcaactgggatgtcacaactagcatttccttatgcatctgaattctgaaccaggtcatgtgagaattatcagaataaaggaaaaatgaaaataaggactctatactgtgtcatgtttgtgagatatcttggccaatgaggcagctcactctctttggcttgggctagaagggcagccaggctcactgctgacaatgcttcccttggttttctaggaaagactgatatccagtcactagtttttctcacatcaggtcttacctgtctcccagggttccatctgccagagacttagtccctgtggagatgctattgaaatatggtggaacttaggcgagtgggcatgtggccttggagaggacgctagggacacagtaccttcctattgctattttacctttcagtttgctttggttgttttgctttctggcagtgtgatgaacaattgtgtttcgttgcatctccataagaagtgagccaaacaagcataggttgaaacctccaaaaccatgagccaaaataaacctcttttccttcaagatagtaacctgagatatttgttatagtgacaaaacccaacttatgtaatagtcatagtagccacacccagctatcaccacagaggacatgccatatgtgttctacaatctgctcggcctcagtaagacttaaggaattcccatctgtgcgaccaagagaagggagccgttgagaaagcttggacccagttttactcgtgttactgacatgggccatgcgcgtcacatctgcaagcactttctgaatgcctgtttctgccatgcaccaggctaatccctgaggcgtggtataggtccagcaagacatatggaaggagtgtgcagttgagcaagaagaaggggagcagggcgggtctcagccatgagatccggagaacaccctcaggagggattataaagctccacactgctctgagggacggattggaccctgagtaaatcccttaaatccagaagtcaagctttaaccaagtatctttcccccaactacatgggatgacttcttttacaaaataagtccctaacataaaattgacaacagtgaaatgtctgtgaaaacaaatctacacacaccacaacctcattctcaggatgactatttcagtgcaactcggtgcatatttaaaatgaaatgtgcagtattcctatcaaaaagtttcaaggctctgcaagtgaaattgtttgacctgtgtggcagcaaaacaaatacaatgggtggtctgtttcaggcccctgtccaagcccaatcacattacattttcatagtctcaacatttaaaagccccacggctgttgtgtcaacaatggcatatggggacatctcccaaacacatggcaaccagcacgttatgcaaacacgtttgctccacgagccagagtcggctgatttacagaaaatgaaatctcaccaagtgacaggaggactttcgtgttatagaccagttccccttcatttgaaacacaacacatgagcttgaagagtgaagatccactccatgaatagacagtcgacttcccaaaaccgcaagcatccttttccagctcaaattgggggttagaggctaaaatgccaggtctctggctttgaaacttatgtgctttccactgcatgtgatgcttagtttaattttccataccactgagatacaattggtatatattcatcaatgttttcccattttcattatttataaagcaagctatgtaggacagaacgcttaaacttaagcccacaagatgaccatcatggacctaaacaagttggttaaattttctaaaccagttttagagccaagcactatgtggaccaactgaagaggcttggaaagacagaaggcagaggattgcaaattatgatcactgtacaaatgcactagtattaagaagattcacgtgtcagaatgagaggaggggtcattgctcccaatcccaaggacccagattctatccttgggacccaggtggtggaaagaaagaaccaactcctgtgggttatcctcttcccttcacagtgtgctgtgatatgtctgcatgtacacacacacacacacacacacacacacacacacacacacacacacaaataaatacactttttaaagaagcatattcaatttccttgggaaacataggaatagtatcaagtttgtggcttgatcatggctactgaagactttctgttttctggttcagtgacttcctaggcagagcctggaaccaaacagatgtttacaaaatccttgctatgctcagtaagccacagaaaacttgagccacatattttccacaaatgtctgaatgccagcgtacctgctgactttaccagcatgtgtgaggcttggtgagcaaacacatttatatgatactagtgtccagggttactcacatgttggctagtaaacagcatacatttgagcacgcatggagtccttgctttggtccagacctgagtatgaagtgttatgctttagccttcagggtagagcttgctttttcattcccatttattgaaaagtcaagagaccatggagacatatacaaggccaaagaacttgctgcaagttcatcctgtaaatcctctctgggactcacagatcctgagggagtattcccctgccagaccacttcctgtgttatatcctgaggccaccacattttttggcccctctcttcagcaggcccttccctttacagctggtctggctgacaattttcaaactaaaatcatacttgtctgagacatgttattaccccatgctttgagttgaatactgccccttccctccaaatgggtgcctctgtctcaaatggctgaatatcggtcacgatttgggtagatgcagtgtctttgctgaaggaatcagcctggggtctcaagtagaaatgatctagaatttggagtaggtgctacatccgatgactactgtcctcagagaaaagtgaaggtgtgagtgtgaagacctggaagatgcagagtcacagagagagaagaacacgctgtgaacacaggtgcaggcgcggccatcatgtaactatagtccctgtaacatcacggcctggataaagagcaagtacagaagtgtacatggagtttcaggaggcaagagggcccagaggacacttggctttcagacttctagtctctagggctgtgaatgaacacgttcccctttctaagccattgtggcaactgccatcagtcttaaaacacaaagaaattaaggcatcacctgactgcttgtctataaagaatgaagaggaggacttagggactttataatccaattatggatcagagatcctaatatagaaccaaagtaaaatgtgtcaatgaccctgcacatgaagaaaacctaatgtgaatcacactctacacaaggaaaacagcagctagagctccccaaccttcattcttgcctttgatgcagcatctaaagagtagagcaaagttgacttgaagcaaaagcattccccctcaacagcatacttccttagaattataaagcaatatgttcctggaagttacgttctagttccattaaaataaaggaaatattttaggaaaaaatatcatgaaacgctgccataattttccatgaaataaccatttcagaaactgtcttccctactcttagttgctgctggtctatctggcccagtattaactctactttacagtaaatttcacttaaattatccattaatccacatttcctcacaacccaactaattagaaatcatcaaaactaattaaaaaaaaaacttaaccaggtgattcatgtacttttgggtattttctcctggatgcaatacataaagaagaccctaaattttaacttattaggaagaagaaaaatgcctttaaaattgtgtgcttggcaatcaaaggtaatgctctcagcatggcgtctgctaccatgtgcagccatgactgaaaaactcaaggtgtgattaaatggcctttttcatattatccccacctgagatttgttaattggaacacagccatcattcaccagaaaggccactgctccaatggaccaaatgagccacccagtctctcttctctatgccgtaaaaacaagtcagttaccaatggtctctggagggccgagggtttctcttcatgtcagtttcagtaaaagaaaacacgacagcaactctgcttatgtacgtttcacatccatgacctctatgaaacatgctttggtttgtttgttttccccacggcacaaacaagcagcattggggaggagtcctccccccccccttggctatcttctcttgtttcttcacagtcctcgatagaaagaatattatctgtatctttcccttctgtatctgtgtttttctctgtgtgtgagtgtctgtgtgcctgtgaactatgtgtgtgtaatgtgtatatgtgcttaatgtatgtgtgtagtgtgtatttgtatgtgcgtgtagtgtatttgtgtgtgtagtgcgtatttgtgtgtatgagtagtgcgtatttgtgcatgtgttttgtgtatgtgtagcatgtatgtgtgtttatgtgtagtgtatgtgtgttgatgtgtgtatgtgtgtagtgtgtatttgtgtgtgtgtgtgtgcgtgtgtgtttgtgtgatcaatttcatgtgttgccttcctcagttacttctgtatttcattttatttctgagacaaggtccctcactgacctaggagtttactgatggctagcacagctggccagcaagctgcagagatgtcctgtcttgcccagctgggattacaggtctccggaattttacatggctgcaggcactccaaactcaggtccccatgcttctccagaaagcagtttaaggactgagccaccactgcccagcccacaatgctgccccttcttgcttgaaggtttctctttacataattgctgcaaacagcaggcctcctggatcctgcttcctgtgtcttctagatgagtctctgcaagggtttctggactctgtccaggcaactgtgtcaaaagcatcatgcagcttgtgacatcaccagttcagcattccctcatggttcctggattgcgctataggtgaaggctgtcattctataagggcatttcaatattgtctgttctcattgagatgtattcatctctcttaactgcagcacacagctgccccatggtcagctcacatcctttctacacagatgtcccttctcaggtctcatgaaaactctttccgggtccccactttttctttgtgtggtccagagaccaccttcctctcccccatgacaaatctgaccagttgtggagacccagcacagtctcactcgctcagaaagccttctgctgctgctgctgcactcaacgcagcagcctctgggcccacctcagctgcttagtgtctttttccaatacctcacttcctgtcctgcttctctcaccctcttgtccagaccaaattgcatcagagagcccactgaagagctcaaagctttgtctcttcaaaattgtccccatctatttgccctttcttgacttaaaccttcccttctatgcagagcaatagtgatgctcttacccatccaaaccaggcacctcaccccatctcagccttcacatttatgatctccaatgccacaacaacaacaaatccttcattttttgtggttctgtttcttgttttttttttcattatagaattgaagacaatgtggattagcaatggattagcttcattgcagtttttatatgcacccacaactaagtagtagctattccatctctcaggtttttttttttcaatcctttatagatttttcttaagtcaccaaccttttttcccattccttccatccctaggaacaagattcctaaatgaatgacagatgatagctagctaactatatagataaatacatgtacatgcatacataaatacatgatagataggtagatacatacatatatgatggaagatagagatagatagatgatagatagatagatagatagatagacagatagatagataatagatgatacatagagctatctatttctaaatagagtcttactacatagcctaaactgggctcaactccccagatagcccaggctagccttgcatgtgtgaaccatctaactcaacctcttgaatctctcatatgaatctctcatatgagagcagaacccacttctaccttgttagtcttaggaatatgttgctttctcagtttctccatcacttactgctccatcttgcttgtcgttgttttgtttctctctactctttcaagtctcttgtcagttaatatattgaaataatacttttaaatatcttttcccccagtcatcataagtgttgattgtcatctggaaaagatctagagtcacctaggacacaagcctcaagtccacatgccagggcttattttgattaggttagtctctaggcacatatgtaagggattaatcttgatcagggatgactgagacctttaggactgatgacccattttgaagagggtggattcgtgccttggactctggccctagaaggagtaaaaagctagatggccccaagcattcgcctccattcttcctgtggatgcaacttcacctcaaattcctgccaccgtggttttccttccttggtgtaatgcgccctcaaagtgtgagccaaataaatcctttctgcattacatttgcttcattgcatttgtgtcacacgatgagctgagtcaaccaatgtggcagcctcgtcactttcttgtgtttatgtgtgttgaagcctcagttgttgctacatacacttgttcacttgcagttttcagctagggctgaaatctgaccactgtactaagttggttttccaaagctttttgatcatcttacttccagctcccaaatccaatggccccattttgcccacttataggaccccccagctgttccttacctcttaagctggatgcctgctttcatgacgttctaaccccctctattttctaaatcctgttactctccttattggtaggttttcttccagggactgcctttcaattcagattagtgactcttaaattttattgacatcatcaatctaagctccagtccctcgtttcttaccttcaatttctgtttggcatcttaaacatttcaccaaaagttggatgcattatattcaaagcatcctctcctttgtacagcttatcatgtccattctccaaggagaacactttgaacagattgcaaaactattttccgaagtttccccaacaagtgcactgggtgctgtattactcggcattttccatttattctacccccacccgcccctactgaaacagagtccctcacggcctctttcaacacactcatatattgtccttaaatacatttttattttgtctaagctagctcactagatgcataaaaactgacatggagttttgaagctatttcagggataagtatgtcaaaagttaagtagagtttgaatcaattgtatttttatctattggcttacaactttgaacatatttttcaggcatggtcttcatagatatgttttttttcaggaattggagtcagtgagctctctcattaaaaaattagttaattcatttcttgcttcggttttcctctcatcacttagctgttaacatttctttaaaggagccaaacataatacaccagtgatcattcccttgagctatcgttgcatgttatacaggctatgatacaaagtcacaacatcacaatgtaatttagaaaaaaaaaaaaaaccttcgaaagaaaagctacaaatttcagccaatataaacttgtcccagggcttcccctcaatctcacagcagggcgtggcactgcacagctgggagctgagctaatcagtgctgaaaactggacatgctgccccccccagcatcccagaaactggcagaagggatcctttcgctcccaccctgttctgttcctacaaacaagcagtgagatataattctgtgagaaggagactccacggtaggtgacctttgagacacacagaggtatggtttggggtgtttcatttttgtcaacaagtgtatgtattcagaagcgactgacctttatgaaatcgaatcactttttggttgtttttgaatctcatcggggccatttccaggaaagttgttggaaatgctgcacgatggtctgtttatccagtggagaaacacagctgtgtcttgctcaaggtgactgagcgttctctaactacctaaatattggcatccaagtgcgggacttgagacttcctaggagcatcaggttcagctcctcaacatttgaagatctatgctaaggacgatcactccctaagtgacaagaagcagtgtagtcaggacctgctgttttgccgtggccaatgttttcccagctgatggtcaccctctcctttacacactctgttccttgcaagtcaactgtcccccacatctataacaagtttacaatctctcagccacatatgcttaataaatccaagagaatcatcaaatcatcataccaagatagggccaattaatcagagagggaattgtgttattcttgggcttgagataaaatgagatggagccagaataagtgaaagaggcgaagagaagcaacagagtatattactgaacacattgagttgctacagagaaagacgcagttagccctgttctcttagaccccattgtctgtgaacttctactttccactttgtaatttctattgtattggagcccactctgattttatgtggctgtaaacacattgttttcccctgaaactctacaacttgcccctgtctcctcctttagtatttatcattcatgacatgctgttttcttaccagttttctccctgttgtgtgtaagctctgtaaggacaacagtctacctgtccatcaccagcagtatttaacagtgtgcattgggatttgggatattctgttttaattggttgaataaatgtctcaacagattcaagtaatgtattaccaaatacccattgtaccatagcaatatttattacagagatgtgtacttaaaaaatgaaaggtgcaggtatggccagcatttgggaggaaggccatttggatagtcccagtcatgaatagattcctgttccatactgggcagcagcaaaggcattatagtttagatttgaatatgccaaattacctcaagaaacctctgtgaagtgacactttctaaattcccagaggtatctgagtgcaatcgaagatgacaatgtcaacaactgtgtcgcactgtcaattttttgttattattgctctctaatttaataacatgcattgctggaccactttctctacaaatactgatgcaagtcatgcaaatggtgaatgtctttcaggaataaatctattctcattactatcacatttttagtgttgcataaagtgacctagaaatcttaaaaataagaaatttgttgtctgtaataggttccaactatcaagcagataccataaattgtacccttttctcaccattcagtttcttctgtttctcttttcctgtttatagcagtttatctgtcatttattatttcatacacgtacacagtttattctgatcatattcgcccactattcccctcctccaactcctcctagtgccactaacgtcaaatccttggaagttcacctcctcctagagcgcaattagtgctgtccatgtcacatgggtgtgtggcaccatccacaggaccatctcctgtggccaggaccccagcggatagtgactcaggacccacacagcagctcacaactgtctgtagctccaggatccaacaccctcacacatacatacaaatagacaaacaccaataaaataaaaataactaaataaaaaaagaagtcctttaagagtgcatatttgttaattatcgcttaccagagaaacaacccattctactaacagcttaaccaacttgacctgagtttcacaaatcttcaggaaatgatatctagtttagttgtgcagtagaaatacataatggttaacagacaaaaaaaaaaaaagaggaagaccacctcactggcctccatatcttctctagagcaccagtactgaatcccaacttccttctggaaggaatgaccagtggttaatgtttatgacatttgggctacccacattttgaagatggtaaatatggggcaatttgatatttctggttatgtcatataagtgccacttttgaagtgctacaatcatgattttcatccatgtgaaatcaggtgacattcagagctatacaagttcactgaactctagagagcatatgtggctcaactgcagatagcagaacaggaagcaatgtgaggagagcaatagtcccttcctcaagcaatgacatggggtaagacagatgtctcagcaatgtcacaatggggaaggaggggacattgtgagtaagggatttagtcaagcagaggtcaaaaaggacagtaattaactccaatagaggcctctgagacaaaggccagagacacagactatggtcctgtcttcatattttaaaaaaattgccatgatcagcataatctttaaccataaagaacaaacaatttatcctcactagagatggctatttaaaagaagaaaactggattcccctgattttaaaaaagtcaatatgtagcaaatgaacaaagcactaggcttcatcaggttgctcccacacatgcatacaatgtactcggatctcctgctaccttctgtgcccatggctctggttccctcttcttcctttatagcatccttcaaatgttggtatcttttttctgggcttcatactgaaggaaataatatggcacttctctctctgttttattttcttgacatgaagaccactagttctatctattttcctacaacaaacctcatgatttaattcctttttgcagttcaatagcctgttgtgtacacatgccaaagtagccatacatttattcatgggcaccaatactgatgccacggtttggttgatgtggcaaacatgggtatacaagtgtttctttatgtacaaactttgattcctttagctatatatacagttgtacagtttgaacacatagtggttctttattttttattttacatttattgtgtgtgtgtgtgtgtgtgtgtgtgtgtgtgtgtgtgtgtgtgtgtgtgtgtgtgtgtatccatgcatgtatgtgcatgtgtggcatacataccatgacttgggtttggaggtcagagaatcagttcttccctgccaccatggaggtcttgggattgaccggccaccagcctctgtggtaagaagttttacccactgagcaatcttgctggccctggatcttccatttctgtctttgaggtgtttccatattgatttctacagtatgtgtgtcatggataccctgcctcctgtttattgggacagaaaacagctaggcattttctctaagactctgtttcactcacaatcatctttgacatgccacagatccatacaaataatcaggaacaaaatgaaaacatgccatcattagcaaattctgtactaaagaaatccacaaagaatcatctctgatggatgctatcaaagatgccagagagatctgcagaatatagttgagagatggtgactgtttattgaggcagacaatagctggactttttctacaactctctatggctttctttttctatattctgagatgaacaagtctcccaaatgacatcctgggtcacacaaatatgctttattacaaagcaccaactgcaggaataaaagtcatgtctgagtttgtagccagggccaatctgaaaaccctgccatgggaattcattagtcctctggaggtttgtttgaggaccaagaacatatttattgctgttttatcttttcagtggtttaatgaatggcttaaaggtaatgatgagattctaagtcagtgagtgttggtggagacatggaattttcccttccctcgcctgttagtgtaaatgcttggaaaagcagcaaattgcagtagttattgcctcatgtgacctccagatgttagccatacaatcagcagaaccagcatccaacaagccacagcaggatgattcttagcatatatgattatttcaataaccacggaaagttcatttttctgatcaactccacctgtgtgatgtaaaacacctgtgtggatttagatacgctcctgtgggggaaaggcaagctttaaatccataaaggatacattaacatttttatttataaagaagaaacaaattaataaaaactaatcataatttattctttaatgctctctatattttttatttcaaaatctctgcctatgatctagataagaagttaaattcttaaagcctctgctaattgaaggatggtcctttgggtgttttttatataaaataaaataaaatcacactgaattactttcatcaaaaattaaacatggatgcagttcatatttgctataaagacaagtagtggtgtagcttggtgttcttgtgggagtctgaacagtgagggtggagggtgtctctgactcttatgcctacacttgggaccattttcctcccacatggttgccacctccagctctgatatgaggctttgtactaagtcttatcgaatcttgttaggccatgtttggtgaatttcctgggagacctattctttttttcctttgttttcttttaaaggaaacagaagaggagttcatctcggatagacaggaggtgggggagtgcctgagaggagtagggggaagggaaacggtggttgggatgtaatgtatgagagagaataaaagctaataagaacacaaaattatgcatgcttataaagatgagtgtactttttaaaaatgaccttcttgccgggtgttagtggtgaacgcctttaatcccagcacttgggaggcagaggcaagaggatctctgtgagctcagaccagcctggtctacagagagtgctaggataggctccaaaactagacagagaaactctgcctcaacaaaacaaaacaaaacaaaattaataatgaccttcttgacattctattattaagagcaggaagtgtcagggtagtccagagttggcatttctggctagaaagacatgaagcaatgtctttattagcatcaacccactgtcttaggaaagcattaaatatgcacatttggatttcagtcctagtaagaatatacaagttgttagagcaaagaaatgatcaggctgagcctgggatattaagggaaagtttgacacccctgaccccccccccaaaaaaagaggggatgagggagaagaaaaggaggggtaagagataaaggaggagacaggatggggaaggtgagagggagaaagagagggggaaagagagggagaaagagaggagaagagaagagaagagaagagaagagaagagaagagaagagaagagaagagaagagaagggaggtttggggaggggagggaagggaaagggaggggaggggaggggaggggaaggggagagaaggaaatgggaggagaggggtatagtgtagtgagtaggaggagagggagagaagagaaggaaaaagaaggggatgacaagatagggcacagggaatggaggggagaggaggatcttgatagtattccaaagtcatcactgatacaaaccaaaacaattaagtaacaattgttacttaaggttccaaagggggtatattcatatatcctttttaaattcaattattgagtggtacattacttatttcttttgcatcaatgcctggcagcaggggcattgcaaaagcatatcttaaaaatgtaattctgcctagatttctatatacattagacaccagcaagagcaggatgaaaaagtcctgtttgtgtgtagaaaattcacagaaatacatgaataaaagtcacattatgccataactagttaatctggtaaatttagtctttcgagatacaattatgttttcttaaagggagactttcccataaaaatattttatagactcttgattctatacttggacttgtgagatcctcatgtgttttatgaatttcactacttctgatacctgagagaaggaatcataaattataaactgtcttctagtgattttataaatctatccacctcagagcatgtaacaagacttacttcctttagaaaggctgaataacatcctactattagctttgtttatctgtagacttttggtttgtttctaccctttggttattatgtgtataagtataaatgtatacatacctctcaaagactctctctttttagacataaagccttatattaattttcagtctatacaaagaaagcttgctctgctttaaatacatattttattatattaattaatttttacgtgtgggtgtgggtgcacacataccaagggtcatatgtaaggttcaaaggacatgtgccattttgttctccccccaccattatttgggttccagggatcaaacataagtcaccagccttaatagcaagcatctttacacacttagccatctcactggcccaagagtatctatctgctcttaaagattgacattatatcatttcacaagaaagccaattcttttaaaacatagtctgaaagaggaacagtattgatttgtttttacaataagaatcaataacttccgaagcttctttattgtctgaagatacagttacaatgccaggaaatccactgtcatatcctcctcacacagactattgtccaggggtcaatggttctctctctctctctctctctctctctctctctctctctctctctctctcaacacacacacacacacacacacacacacacacacacacacacacacctgaatatagtccatgctggaataaataaatggcaaagattgccttcggatcagccacccattctatctatagtcttctttaaaactttttagacatcatcatgggaatagtggagagacctgaatattgagtttttcacagtccaaatatcaccaagtcatggagattgtcaagcctggctcccttattatgtagctggaggatgtgtccaataagacacaggggtctctctagtggcacaccactgttttccctccagggactagaaatccctattcctgttagagcattttaacattcatgcatttacacaactataataaattaatggggtaaagcatgaaagtctgaactgttctgacagtgaaatttctttcttttttcttactttttttatatatgatttctaggatgctgtggctacccattaccccagggacttaaaggactagcctccttccctcaagagaacagggcccattttagttgttacttgttctttaaagacaacacagacaagcaccttaaagaattctgaaacacagctcaagaacccaaactctgaccttgcaccttcttttttttcaggggggatgggcaattcctgggattaaaggcccatcttgaccttgtatatttttatcccaatagacatgaaaaattgaaaacgtgaaatgttgttttttcttgtgccttttctttgcttttgcttggtcctctatactagcttttctgaccttgaatggatgttatcaaaagggatgtatcagcatagatggacagactggctaaaagcatatgaacagtaacaaggaaagaaaaaaatatatagagaaacaatgaaaggatataggaataaagaccctacagggatattcccacccccgattcagtagagcaaaagatctgtcagaaaagaggcagccacccaacctgaaacataactacatttcaaagtatgacacaacatgaaagaaacaaagcatcagtagtgtgtttaccagatggcatctctgaacgtgggaatataaacccctctgtttgttctttgacttaagatgaaaggaacagcaacaatagttcaaatcatggaaaaatgaaagagcactgtgattaggtttggaagaatctggtcaatctaatagtgattgtgaatccagaaagggttgagtgccaggtgagaggctggctcctagcctgcatgtaggaacccactccccactgcctacctgttgtgactgatggccattcatttggagaaagagagcaggatatagcaccaagatatctgagaaaagctaaaagaatcacaccatagctggtgttttagtttggtaactgttgctgtgacaatgaccaaaagcaagttggagaaggaagcatttgatttagcttcacctccagttcatagtccctcctcaaggaagtcagggcagcaactcaagcaggaactgaacagaaaccctgatggcatgctgtggacaggcttgctactgggcttgtgcttagtcagctttcttctacagcccagaatcaccttcccagggaatggtacctcccacagtgggcagagccctccctaatcaattagcaaccaagacaatcccccacagacacgctcacaggccaacaatgtctaagcaatttctcagctgagtttttctcttcccagttgactctctagtttgtgtcaatataaaaactaaccagggtatttcctggtcttacttttgtaggccaatgggtgactgtgggtatgattaaaaatctgggccctggtgtgacacaaatgtgtcacaggcccaggctctaccagtgactggctggattatactgagacaagttccttatccagtgagctgagctgtcaagcataagtagccgcagttgttacaggcatttttttatggcagggttcagcacccttgtaagtgctatgctgcttattaacaagaataaagattatattaataacaactcctcagtcattctgtttgtgatttgcctcactgttacaaggtggctcacagcaaggctctgcaggagtcaatggagttctaggcatgtagctcactgccctcttcatgcctggctcctgagtgcactctagaactgctgaaaggtgagatctacagacagcagcaccctcacaccttggctgtcagagcagagctggccccatcctgaattctcagatttcactctcattactcccagcagcaaatttatgggatacagagaaatgactcatgttctttttaatctagctagttaatagcaacaatggcattcccactgacggtacaaaaccgtgatagagtcaatgtatcctagcaaacaggaactgctgttaagcaggtttgtcactcagaagccaggaaaatacaaaaaaaaaaaatacaatttgtaattgcttaagtatggtgtatattaccatgtagtttagtcacataaactctcctggggttcttttgtccaattttgcatgaagaaaaagtcacttgttcgggctgcagtcttattactaaatgttatttgtgtttatgcaagtgataatttcatatttttgcatatcattagaattagactaaaataacttttttttgtttttttctattttgaccatttttaaagacagagctccatggtattaaatacctcaataatctgaggtagccattaccactgtaatttctagaaaggagttaccccaaatagaagctctgcacatcctgtaccccacactgtggtccaccccggtgagacaagcattcttctactgtctgtctttataaatttgttcattccagataaggcaaatgatggagtcagttaatgcttgtccctttctacctggcttattttaccaacacagtgttttcaaagtcaatctattttgtacctgaatgaggaatcccaccatgtgaggactgacaggtactcattggtgcacatatagcaagcatcctgcccgcccccatcatgtggagatgggtgtgggtgaactgtgatgccactgtcgatattgatgtaggggcctatccagaagtgggggggggggtcatataattccacacttatgttcacattacttcctgctccaatcagccgtggacaacaatccccagcttgtactcattcccaccaaccgttgcccacattttacggtaacattcatgccaaggaatgtgaagtcctcgctcattaaaattagatctgtctgttaactattagaaaaagaaaaacaaaataaagacacacacacacatacacacacacacacacacacacacacacacacacacacacacgcacaaataaattattgtacgcctggctcaccctgtatgcaaaaagctacggacatctggtgaaagcttcaaagcgaatggttattatatataatatatatatatatatatatatatatatatgtatgtatgtatgtatgtatgtatgtatgtatgtatgtatgtatgcatgtatgtatgtatgtgtgtatgcatgcatgcatgtattttccaaatggggtgatcttgagcttgagaactacagtttaaaacctgcagcaaattctcgagacaggagtctattctcggtgattagaaaggaggagcctggaccctaaggtatgtatgcaattctcagcgctgctctcactcccaaactcaggttacccggcgagccttccgcagcacatgcgcaaacccatgccggggggggggggaggctgcgcgcctgcgtgcgcgctcccgcgacgtcgaggggcgtggccgcgcgactcggctccgggttccgccatggctgtcgcccacagcgcgggtcacctgcggcagtgtgtggtgtccccggccgggagacacagcgcctcgctgatcttcctgcacggctcaggtgcattgcagtccggaggtccccggcggcgcgtgctgccgctgggggtgccctgtcccccgtccccagagctccccagagctccccagtgctccaggccgcctgcgccggggccgggagcgaggctgccacctcccgggagggtgtcctcttcctctgcggcagcactgtggtcatctcgctcccctcgctggtggcctggacccctccagccacagcacggtcatcagggcagtccttaccccatcccaagttcaggctcgccacgtgcgagcctcaggcgcatgggtcagccgctgtcttcagggtcgaccccgggtcacaggcctttgtccgcctttccagtgtcagagtgagccttggtcttcactgtgaatggatcatatttacagcctgtgtccttcctgcttggcaccaccagggttcccgtgcgctccccacctgtccatgtccctcctccctgatccccccctttgccctatgtcactaaacatctatggtaagtacaaggtcatctccatccagggagttgcccctagagaaagaataagaacccttgtttgaatccttgcatccacagtgcttagctggcccagggtaagttcccaggaaagaaagaaaaaaaaaatctttttttttttttcttttaaagaaatgagatccagccggtgtcctcagggggcccacctaaatttaaaaacaaaaacaattcaattaatttgagtcagcagtggacagggggtcacaagatggtgcctgagctactgccaagtgaaaagtaagggaaggagaaaaaaaaaatgtggttggacattagtaagacatttgcaactgaagggcttgtcagagttttccaagaacgcctggtttgagctgagacacgtgtaggcttaaagggaatggcgactagaacaggcaagggactggaaacagtgttagcaatgatgtgaggtgttctcttcattttgaaaaccggtctagaaagtttacttgctgtctctgtgtgtggtggtggagctgagatgtgaacacaaatgcctgactcggaattaatattcggagggggaggggacgggaacccggaacgccgatgtatagatgtatcactttggaaactgaagggttgagcgggtgtgaaggtaaagacatggctgatgacttacgcttaaaacgggctgaatagtggttattcaggaccccaggagcatctggtgatgaacatctagaatccccacatagtattttcttctcataattaattcggtgtcttaagaaagaactagaatttggtcccccccaccaccaccaccacactttgcttaatgcttcctatttttcaatttcaaatcactgacatttttacaacctataatgcatgactgaaattagagtcatccactctgtgtgtattttatacagtgtgtgtgtgtgtgtgtgtgtgtgtgtgtgtgtgtaaaactttcctttgtacattggaaaaagaattcatctaaataattcttccagatgttcagatatattattcttatataatgaaatctccactggtacataaaaaagctctattccgaataggcctgtcctgttagtttttattgtcgtcttgaaccaggaatcccctggggagagagagtctcaattgagaaattgacctgtggctatgtctacagtgaatggtcttgattgttggttgataaaggagggcccgctctctgtggccattgctacccttgggcaggtgtcctgggttgtataaaaaagttgagcatgagccacagggacaagccagtgccagctttgctctgtggtccctcgttctgctccaacatcccttggtgacggactgctagccagaagaggaaggtgaagtaaaccctttcctctcaagttggtccaggtcagtgttttatcatggcaacagaaagcaaactagaatgaggccttggccctccagattggggggtcataattttacactggacttgagcatgtgtttgtgttatagggacaggaagtattggcttctgggtaatccaagtgtaaacattttaccatagtttggaataaggtactaactttttgtcatttaatttttttcttgagaatttcccacatgtatatcaagggtgcaaggctttttgaaaagtgagccttgtgagtggctgggtgttgtttcctaacattcagttgtgtctttctcccaaggctgaaaaagtatttgaaacagattccttttaatgaagaaaatttaaaaagctttagaatctggtctagagtataacagctgtagacaaatatatggggatatgcccttttctacttctaaaatgtcaaaaaagggggatagcttttagggtgattaaaataaatgttagcgttgttttcttgctttggtctcccacactgggttgctttgctctattgttttctcccctagaagtgtctcccctcagtgccattcatcatccctgtgatcacctaagttaatatctgtgttctgaactgaccattaaggctcataaaggcccttctgggtatgtcttgttggtggctttctcccctttagtttgtcttcaggaggtggctgaattagatcctgctgaagttacaagaaaccctttgaaggggcattccttatcagtagacactattctcctctctcttcattcaccctccactcactctctgctcctctgagtttggatgtcagcagcccctggatttcttgggtgtcaaaacttgcctgatgtcctctgttttagcagctcacttctcatcccctgtagatttcagctcaaagcctccaactactccaccagacacctgcatgtgtcagagcatttgtagggggcatacaattagtggataaagcaaaatgaagcttgccaggaagcttacattgtagccaagttgttctgcaacttattagctggatccattcagaatgtaacaaatgctattggtaccaagtgggtcctcgatggttactgttgcctcttatgtttatctttggtcgctagatggatgcctatttgtcacagttatctgttttcaccactgccatgatggtgtgaagagtgtcactcaggaatggttattgagcagatacttttgaacttgatatcttaatgaactgatcaattacaattttaaggtggggctggggagatggctccatgggtaagaatatgtgggcaaacattagaacctgagtttggatttccaacacctaggaaaaaactggacattgctgcatgtgcctgcacccccaccactgggtgtctggggcttgctgaacagccaacctagtgaaaacaaaaactaaacaagcaaaaacctatgagctccaggtgcagagataggtcctgtgtcaaggggtaaggcagaaaattgtatacagtgggacacccagtgtcttctgacttctgcacatttacgggcgcgtacacacacacacacacacacacacacacacacacacacacacacacacacacacacacaccagagacagaaagagggataaaaatttaaagttgtgaacttcaccattttctcttcagtaatgtaagacacacttagattcttttcctgtctccatgcacatagacatacattaattcttacattaatttttttggtcttgaatagtaataataaaagatataataaataaatatgacaacacagttaatctgatatcttctagtttaaacttgaagtagcataaatgtcttacacccccacctcactacccaagaaatttcaccaagaaaattgcattaggtcataccagctataatggtataaatcacatggacaatttttaaatttttttaatttaaattagaaataatcttattttacatatcaatctcagttctctctcccacactccccactgacccccccttctcatcccccatccactccccaggcagggtaagactgtagggagccgtccctgcattctccattacaagatggcgcctgcatccggcaggcaccaaatgtaaacaagattattgtgcaggcgctgggtaattttccattccttgatctctgcctattccgtggcgtcatatggccggatgagctacagccaatcatagggtgacacgtcccaggcggcggctgccagcctttattaggggacgggattcttggctcagtgtctccgctctgggaagcttatgctctccactctcaagatgcattaaagcttgtctgcagaaggatccgagtgtcccgtgtatgatttcttgctggcgagaaatacagagcgtgcgcgggacatatggtgccgaaacccgggaacatgtgaacatctccagcacctcggagacccctctaacgaggcggattcagaactgcagggtggtaaattcggagaggtatgatttttctggactttggcttgggaatgttgctattgtgggaggttaatatagaggcttctatgcttttactaggagctattttgacttttctcactgttgtagcaatcttaaagaagtccagaattacatatcagaaaccgaatgtggtgagagatggggcgcgcctaacaataaaatataagaaaaaaggacctcccgggatgtctagtgacaagggagtgaataatttgttaacagaaaaaacaacaaataagaaaaaaggacctcctggaatgtctactgacaagggagtgaataatttgttagatgattctgtaaataagtttaaagctttaaatcttgatagctctaatgactctaaaagctcaagagatggggttttggaaggaacagctcagctggatgagggagagacagagaaggagggagagaaaatagggaataaccggtcacaccccggtaaatttaagagacctgttaatccagcgggtgtacttccatcagcacccccattatatgagttacaacaaaaatttggtaccaactcctttttaccattagaggagcggagaaaattgcagatggctttcccagtctttgacaggggaaaaggccgcacatgttattcaaaacttcttagaggcctgggatgcctggggaaagcctcatatcctaaagttgctcaagtaatttatgtatgcttgttttaaaatgttctatttcctggtatggccattttgtagctggtcacatgactgacggtagccattttgctaaagttaaaaaaaggatacttaaaccgccatcttgactaaaggtgaccgcatggaaattagaagtaccatcttaaaaacaagtttttcagttaagatttaaaatgttaatgcttctatatattacagaaagaccttaaggaaatttaaatttctttttaaaaccagttttcaaatgtttgattttattaatgtttatacttaaagagcttcaatttagaatttttaagcaaagcctgacaatgtaaagttcttgttttgtaaaagatgctaatctattatgatggtagcacacacctttaagctcagggtgttggtgacacacgcctttaagttttgggcgttggcggcatacgcctttaatcccagcactagggagtaagagacagatggatctttatgaattcaaggcctgcctggtctggcagatcaaattcaaggacaggctccaaagtcacaaaaaaaaaaaaaccctgcctcagaaaaaagttaaactactgtttaaggaagttcaactgtattacaaaaataagactttacctagccacctgtgtgcttcttaaaaacagataatgggccggcttatacctctcaaaagttccaacacttctacagacagatggaaattacccatctaactggcctaccttataaccctcaaggacaaggcattgtggaacatgcccatcacacacttaagtcttatttaatcaaacaaaaggagggaatgggagcatccttaccctcggtgccaagagttacaatatccatggcactctttacccttaattttctaaacaccgacgctcagggccatacagcggccaagcgtcatacctcagaacctgaaaggtctaaggagatggtaaaatggaaagatgtcttaactggtctttggagaggcccggatcctattctcataagatccaggggagcgatatgtgtttttccacaggatgaagagaatcccctgtggatcccggaaagactcacccaaagagcctctttggaccctcaaaagtcggaactccaccctctccccgggagttgagagccgctattatccagattaactcctgtccttgacggagggactgtcatcatggattgcttcagctgtctcctattttaaggaatgggtggaggtgggattgtttggtgcagccgtttgctgcggattgatgttgcttctctggctggtctgtaggctcagggctcaaactaagagagacaaggtggttatcgcccaagcgcttgtagctttggaacaaggggcttccactgatatttggctaactatgcttaagcaataggccgctggccagacagctcttgcacacccggagcctaggctcattgcacagggtagagtgcctggcttgagcagcccatgagggatgtcgagcaaggcatcgcacagagagttgcccaatatgcaggcttctctgggaggcatgttgtcctgcataagggttgcctgccctagtctccctttcccagaaaaacggcagaggacaggtcgagagcgcttcgggtcaagctaacagcctgatggcgactcttgtacacagtcttaatatttgattgggaaggtacaacctctgcctctatccctcaacatttgggtgacctatttgcttgtaaaaatataaagccttatcattaattaataaaaaagggggatctgtagggagccgtccctgcattctccattacaagatggcgcctgcatccggcaggcaccaaatgtaaacaagattattgcgcaggcgctgggtaattttccattccttgatctctgcctattccgtggcgtcatatggccggatgagctacagccaatcatagggtgacacgtcccaggcggcggctgccagcctttattaggggacgggattcttggctcagtgtctccgctctgggaagcttatgctctccactctcaagatgcattaaagcttatctgcagaaggatccgagtgtcccgtgtatgatttcttgctggcgagaaatacagagcgtgcgcgggacataagaccttccatgagggatcatcaaaatctgtcaagtcatttgggccgcgccccccccccaccccccccccaccgccgacatgtatctaggctaagagagtaaccctccatgggaaatgggctcctgaagtctgttcttgcactagggatacatcctggttccactgccagaggctccaagtgttagaaaacatctttaaaaaattctctagaagaatttattatatctattacaaatgaggaaaactgaaattcaaacctaagtgtggtattttaactgattaacaatacattcagatgtataataataaggattatttctattgttcatgattggtcagctaattctgcctgctaaatctaaacagctctttttggcacatggagattttctgcgttctctattccagccttcaagtgtcctgagaggtacagatcactttgaaatgcactgtgttatgacagtgtttatctgactgtgaattttgtaatttttcaggtgattctggccaaggactgagacactggatcaagaacatgctaaaccaagacttggcattccagcacataaagattatttatccaacggctccctccaggtattcaacgcttaatttcacttctcaggagagctccatggcataagatgtatgtatgttccagcaagatgtttttaactttgacttctgtatttcagatattttaaattatgatcctcagctcccacctgtaaaaatgcatggactgtgggctccttggccaagctttcctggcgagcccttctctctggaacacacactctgactgaccccttctcagcccaccatctgcttcctgcacgcctgcacagtgctcatcttttagatgcccccctttacgtcacatactccaaaagcaaacttagtgacttctgccaagatagtgtttgtgataatttagttaaactcaggtttgtaacccctggaaaagagttttataacattctttccaaacttgaaagggtggtaaatactgttaggctctttgaatcagtaaagagtagacatgcggcacaggcctacttaatgtttagagtggacatccatgggtgtatctaatcaaattcacaatcatgagagtagaatgattttgaggccataaacagcttttttataaatattaaataatcactcatatagtcttttttcaagcttatttttgcataaacaaatattgtgttgtgttatacaacccgatttgatttctcataatctgctctcattttttccccttaaacatgctttccattcactaaaaagtactagattttcagtttcctgtcaaccttgtactcataaaaaatgaaccagaatttcaagaaatgtcctatattcaccaagaagaacatccttctctagtctatagaattgaacagttagagaacaaatatgagagtgtaaaacagaagattcaaaagttattttaatataactaagctgaggggtttggtagtgctgacagatacctgttgacagattgatactaagggtttgttgtcattggcttttagggtaggtacagttggaagggaatgtgatatttacgtgaaaaccctgtaaaggatggtgtgttttaggctaattgtaaatggaggtgatcaaataagacatttgagacatgattctaagaatttaacagtttttatttcttactaagaatttaatgattattgtctcttgactcccatattatcaattgtaacattaattctaggacactgttgttcaaactttaaaccagtaatatttcatatttacatatcttcacccgcactcttcgtcatttgtgggtgtttggaagggtttgtccctctaggtttgtgttaggtctcctttaagtgtttgatagcacttagagaagtcacctgaacttgaagttttcttctgagttgtcggcaataaatttattttcttttgtagaaccaaggttttcagattttctatgtattttcaagtcagtgtcagtgatttggtgtaatttgcctttgatttagtgatacttatttttaatgattaaatttctgtttatatattttatttgttctgatagtaatagcttcttgttattattatgtatatatgtatgttttgtcttatcaagggttactagttgatgaatcttttttttagaaccaatttaggtttgacttttttctctatgtggttgtagtttggacacagagtctcactatgtagcccaggctagcctagaactcatgatcattctgtcttctgtctcctgagtgctcaccacacccagcaccattttctctcttacttttcatttatatcccttcattttctttttctctcctatttgtattagagcaataattttatcaccactctagccaaatctcaccatgtttttttttttttctgtcttatttatgttggaagatttttctatcaccttcatgttccctgtataattcttgtgtaacaaatcacccctaagcaacacttttattatggtcacaaattttgtgggttaggaactcagaaagggcacaatagtggtgactcaatcccaatgctgttgtttttggggcttctcctgggaaagcttgcaggttgggtgtggcttatgacttgtcagctggggatgggacccttcatctgaaggcttactcacacagctggcagttgattctggatagtagctgaggctctcctgcagcctctgcactgggaccccgacactgggcttcagcatttggagttgattagatatgtgtttgttgagtgtgtgcatgtgtgtgcatgtagatgcttgtgcacttggaggtcagaggttgaagtcacttttctttctctcttgctctccaccttgttttatgagacagtttctctcaccaaaccttgagctcactagtttgacgagactggcaggccagcagactctagtgttctagctgcccctttctgatctcctcccaaagcctggcaatggggttagggacaagtgccaacactcctggcttttactttggggctgaattcagatccttgtctttgtacgggacacatctccccagccctccatttggagtcctaagctgtgtcatagcctggaggctcagttcccaggggagatagtctcagaggacaaagaagttagctggtgcagagcttactcggaaggcaagtagagagtataggcctttgcctcttggcaaatgtcagtcacgatgtggaagggcttgcatggttactgttctgactggatgtaaaaaatgtaatccctaatgttggtggcgcacacctttaatcccagcactcgggaagcagaggcaggcagatctctgtgagtttgaggccagcctggtctacagagtgagttccaggacaggctccaaaaccacagagaaactcggtctcaaaaaaaaaaaacaaaaaaataaaaaaataaaaaaaagaaagaaagaaagaaagaaagaaagaaagaaagaaagaaagaaaatgtggttgttagagacaacatgcagttgacctttgcttacacctttagcccagaggacagcttctgtcttttaaacagtttgtttagccattggatttataggtttgaacaagtctgttttttttttttttctcctgtattcttttttcctcattttttgcaccatttaaattttttaatatttcaatttatctgttcttttttcctcctgactgtggtaaggctcaatataaatcatagcccttcccccatcttagagtaaatatatttaccactgtcactgaattttagaacttcaaattacatagctccctttcccttttcccctttctgattctcatgtctttcacctatctatgttgagaaactttgtttttcatagtaataaatgccacaaagaacctaagagggtcattgctttagtatgcttgctcagtgtattctataatggcatatcattgtagtttcactaaattgtgaattactcttttgtctataagtactccttttcttttaataaatggcctaagcaggagtatattaaataaaagtcaacaatagtttgttgcattaagtaaagtagaaaaatagaatagtattttttcattatgttaatttggactctttaattggacatacccaataaacatttttatttttgtggcatattttaactgtgtttacaaccacaggctttcttagtttggatttaataacagaatttccattaaaaaataacaatgttttatagtccatttataatttttatggtataaattctctcagagatttgaaacattctgaaactcctcagacgtgtgtctgcctctacatgttgatcacacaatttccccacacaaagggagtgctcagcaggcacctgcagtcaacatggactaaagcagattcagatagttagtgttttctgtatttatatgtttacatgttcatatgggccgtaaacatagaaggcgcatgcacatgcatctacatgcaggtacacatagaggtcagaggtcaactgctcatatacagactgagtaaacaggcaaacaattacagtttcaagtaacaatcggtgccacgaggaccatcaaggtaatgagacagtctgcctggcagaaaagaggccacgctgccatggagtcacagggaatcctttgagaaggtgacatttatgttgagacttagtcagggggagctcagcatagaaagacaggaggagcatgcaaggagagggagaccagatgtgatgctccagggtcacctctgagctggtccaagagactcgaccttagagcatgctgaagcaaattatgaaaccaggaccaaggaggactggagccaggttctatctgaaaggctgcaaatgatcttttggtttctgtagtttaggggagcaccgaccaaaataaaaatgggtattcagctgaatgcctttttattaaaaaaaatatatttatcctgggctaatactttaccagtgtgtaatgggtcgattgattgattgatttaggaaccacacagatgctctttgctgaacatatttgtttattgtggtaatgtctgagctgcttttataccagctaataaagtgatttatttgaggaagaaagtgaatgaatataacacatgtgccaggccttttagctgtttaaaaaacaatcttttatgctttatataaaggttattctaacatcttggagatttatgtactcttgattgttttcttagcaaaaaaaaagttctgaagtctttttatcccattaaattatcctaatgatttcttttgaacaaaaaaaaaattattttttttcctcagagaaatgagagaccaaaaccctgcagatgtataaattgggctttccattgggctctatcatctcagtggcctatctatctaattaattaaataaggcattgtcaaagggaaaggagtagagtgagtgtcattttttcccattaatggctgagttcccagaatgattcacattttagcctatgatatcatccttatttaagtgcttagacagacaaataaacagttagaggactagcagaggaaaacggagagggaagctgaagtgagtcaaaggatgacagtctgactggaacttcagagtgagggctgtgccatctcctctggagttgggcttcaactaagatgtcagtggctgtcccgatgaacttgggactttaaggtgcatgacaaggactttgaacaaagcacctgccttcatttgcagtggactcgggcttaagcttgaggaggcctctgggaggaggaagggcttgggtgatttctgccttctctcctgagcacagtggcttctgggatccgaaggtgcagtgggatgagaggggaactgagttgagctgctgtgggattttatctttcctgcagcaactgagtatagcatgaattctaactggtcttaataataaaaacccagaatcagatgtacgggtaaatgctgaaagaacagagaagcagagcagccagccaggagttctaacctctagtgaatcctcagaccagacgggcgatcctgtctctaggaccctcagactgaatgcacccagctctggtctcctccaacctaatgttcctcaccacacccagccctgtcccctcctgcctccacctccctagcgctgggattaaaggtgtgagccaccactgcttggcctctatggctgactagtggctagctctgcactctgatcatcaggcaagctttatttgttaaagcacaaagtatcaccacaactgagggcctgggtagaggggagagggagaaaagcctggtgggctcagtctacagaagtctgccctcctcccaaggttttctcttagaacattaatctcagataataacgcatgttaattaaattcccaagatatttttaaaaagaattatttgagagtatttcagacttttccaaatgttttgatttgcttctttactaaataaagacccatgaatgtataacctagtatgacatctatcatgacaaagacataggtcagtaggggaatctgcctttgtggaggtgcagaagccaaaagttgttagtgcaatggtatttttgattttccccagcctggtaggattcgttcttttctagcagattaagcaagaagtccctcacggtgtacagtgaagccttaggtattagggctaccacttgtctaagaatggtgcctgcttcctctcatcatccccatcagtcctccctccctcctccctccgccctcctcccaccctctctccccacacctgtccatattagataacatgaatttgagcttgagccataccacataggaaagagtttcccaagtttaagttttgaacagtaaaaatggcagctcaagtcatggaaggattttagataaggctttgctggttatgactatctctgtgcaagtgccccccccccaagatttgaaaaaaacacttgaatcaggaaagctggaaactgaacttttaaaggaagacattttgaatgctttcaagtgtggaattcttttatctggtaaaaagggatactttatataatgatgtaatggtattctaattaaattataagataatttaaaagatactataaatatacatgactatgcaaagaatatttagaaaacaccacacttgaggacagaaggcaagtctttgtcagtaacacacagtgctcttctgaattactgggaaaagctttaaactccgacagaagaaaaatcgctggtgttgtccatcagcatttccactgatgcaatgatttgaaataggcaaagttaatcagcgctggtgggatacccagtgtggtgtgggaggtacatctgagttgtcggaaaagatctgggggaggttgcgtcttgaggaaggagtggtccatgtgaccatgagatgggggtccccatgtccagagcatttgaaatctgaggttaaaactgagcagggttctatctgtcaacccaataaactttattttatgacttagttgatacactcaagagaatggcaaggaagcaggtcaggtgtcagctggttctttttgtcctcctcgtcttttgcttttctaagttacacgctagctttccttccgtgtggcttggaaagtgagtgcatagctgagtctgagaaacaaagtagaagaggtagtgatgagtagccagcggtgagaagagtcactgtgattggttgagatgcctttcaatcatagtgggtcttttgttgctggccagctcatgtgtggcactcttacatataaattgaaccatgtattttgctatgaagtaagaagatgagagcttgccagggaatgggcagtgcctctggtcaaacctcctgtcccttatcctgggcagcccttccttctccatgctttagcagagctgcctctgctcagcaaagcgtctccaaaattgtcttcattccccttgtctttacctctgctgacacagagcttagacccaaaacctttaacaacattgttattggtttacaaatatttggaatgtgcacaagtatgtatataaaactggaagttcattgcataacattaaggtacacaaatgggctaatattcatagcaccataattgtcatacctcctaacaataggtaattaatgggctgtgagatggctcagagggtaagggcgcttgccaccttagaaccatgttctaccactgaaaccttcaagagtcaactgacacttgccaattgtactctgacctccacgttgcccatggcacacctccctgaaataaaaaaaaaatgtaatgattagacagttaactaaagatgctgaaccagctttaggaaatgctaatggaataaatataaggatgtagctgtagtatgtattgggcattttccacacaaattctttaatataaaattcagcaaaaaaacagtacattaatcctttagaaattttaatatcacttctttgttgttgttgttgtttgttttaaacaggccatatactcctatgaagggagggctctccaatgtgtggtttgacagatttaaaatatctaatgactgcccagaacaccttgagtcaattgatgggatgtgccaagtgcttactgagctgattgatgatgaagtaaaaaatggcatccagaagaacaggatattaataggtgaggtctttataacgttggtgatgcatttcacttttgtctaattaaattttttgagttacattcgtaacattgtttacaagtatgtgaatattgcttgacacattcacagttttggataagctgcatgtgcagctttcaaaaatattagagtcataaacaacagctcataaaacttccattgatttcatttttaataataactctttttttgccttgttttagacaaggcattgctatgttgccaagattgacctcaaaatcccaattctcctgcaccacatgggctatacgaacacaacatcatgccctagctaatttgccgtttttaaagagataattaagtttctactcttaatttttaactgagttatccattccaattaaaaatacttttcttttatgtagctggggtcttagattataagattaaactgctcttaccctgattgaaataagatacatggtgagaatgtgttgtcaaattgatgagcaagaagtctttcgagtgagtgtcacaagaataaagcgttgataacctgtgttaatcatgtcacagtgagccctgttcccaggggcatttaaagcttcatgtaaattatgtattgaattcttctttggctgagctcatcaaatacactaacaaaatttctatttaatacgtacaaatacaggatgagctgtgtaaaatgtcagcagtacagaatgttttggtcgtatgaacttttagcaacagtatttgataatgaaattataatgtcaattaaatatctccaccctgtgctaaatagcatcaaagtatactcagaaatcttctagagactgggttgaagtatgttttagtgctatgatgttccttggtgctcagtgaggtactgaactgttcagtgagttaccaaggcctatccttttcactcttcagtgatcatttaaacacaaattactgcaaaatatctttctgctagcttcactctaatgtgtcagacaactctgcctagttcttccggtacaacagaggcctgctgatgcttcctgttaagagaacaatgtgagtcctttgcataaaacttggaaaatgcattcttcatgggccactccacagtcagctgtaccctcctttgtgtctcctttgacatttgtgaatcctcattgggtgcattaagaatataggacaatgttcatttacttgtttttttttttttttgcactatttacacaccacattagtctataaagtttacgataaaacttagaagaaatacaagcattcaattactaactttccaactaccttctgaaaattaaccagatagttcctggtagaagcagcactgcgaggaaacttaacagtctgtgttctgactttcttacacactgtgagtacccatgtgtaaaatatgagtgcatgtgatagtgagtgcatgcctcttggatttacttcatgggcttctgtgtgttttatttaagaagagaaataaaaatgaagagtgagaggctccagtgtgcactctttgctgggaaagcctggaggtaacggtaaccctctcccgttagctggcactcggctcatcagtgtgcgctagagatgacggtagccctctcccgttagctggcacttggctcatagcagtcttctgtttggaaagtgttgaaatcataagctgttcttccttatacagctgtcccattgagccttgcaattagaaaggtaggatataattatttcatcccatcaatgaagggtctaaactccataggttgtgggtgacacagagggaacctagaacccaagccccttgatttagccaagaactttctgccatgatagaatccattcatggccactaggtggtgacaacttgttaagagagactattggtataatttaggttcaattttgatctggaatgtatagaatgtgacaccagaatttgggtactatgagtgtatgatccaaatttgacagtagggaggagcaagtgtttgtaggaccacacttctgtcacatgggcagcttgcacacttgtaatgaagtgctccattaaagtagtcgtggtccattcatgaagctgtgttgcatagccatcaaattccctgtctacacatagagggcactcagtaagtatttatccgttttaatttagaccttaacttttgtatgttttgcaatcccatggaaagatgtctcacacgaggaatccatatgagaaagcaagatacaatatgaatgggttcaactgttaaaacaaaatttgaaaacctgctgaacagatctaggtactaagaatttcaggactggtttcctccatttgctttatctatagaagaaatactttacaggatggacatttgttaacatatcaacataataatagaatttaagataaaagtaaaaaagggggcatagggaactcacagatacagcccagcaacaccattttctgaaccctcaggtcctgcctgggggtaacatgtggggtgatggtactgctctctctacatacctacaaataaatgcatttttactaattaaaaacaactcaggattctttcagcaatgctcaccaggcctccaaaggcttggttggaattgctgtcctagcactcttgcatagaagagtagaaatattgtagctagccagcctgataggagagaaaatgaagaaataagcaaggtaaccaggagtcatccattcccaggcctttgcagccttttcccacatttgaagagtactagagtaccatgtaaatgaaatagagggactgaaatttggcgtgggggtagattttatacctttatttttttttcaatctgttcccttgatagctaacttcgtgtttttgttcataggaatttgcattgagagaacacattaattttcccagtatagactttttatagattgtttctgttttattttatataaagagttcataaatccaagtttattatttttaacatgttttattcagcttgttagccttaagtatatgttaaattgttacctcttactactttaaataattcaccagcgactataaatgcccactatagccactacttacaatgaatttaccattttctatttgcttactgagtagtatattgtgggctagagtgtaggatcctagatgaaagactgactcaaataactggccctttgtgttcagttttcttctctgagggaaaatacacaaagttccttttcacagtgtcccatgctagagttgacagtgttgtcaaagccagcaagtggggagctgtgattacctcacaagactgtaaatgtgttagggacttaaaatgtgatcttaataagattgcaatatcacatgctctcctttgagatagacagaaacacaaactcaaagcctgtaggaaatctccatgtgttttcttttttctcctttttctttttcttctcgtctcttgttcccccacccccaccccagccccctttcttatttcatttttttttttttttatttctcaggctagtctcatcaaaagatactgaaccacacaaagtcactagatttcctacataataaaaatgaaatgtcaaagatgcttaatgtgttattctcttatggttttataatcactttaaaatgtattgtagcctattagtttatttcatttacactttattttttaatgatatttatctcagtctcaagattttcttttatgaattaattcctctagcttattggattttggtaagttgttttatctgggtatactcagatgatctttgttgttttagtagagctgccaccaacgactatggttctttaaattcaaatttaggctactagcagttaaacacagtttaaagtttagtttccccctcacattagctgtccttgaagtgactatgagcaatgtttgaaaaaatgtaacgcaagctcttgagtttcttagaaaagaacagctctgtggtgtccacagaagacagatccatcttcaatcatggccatgcttgcatttcacccataatccttagtgctgaattactcacaaaacagctgcaattcccaaaagtctaattcatggtgtaagagcacttgaaatcagacatatgtgatgagattttgctagtggcctgggattgatatttttaagaagacaaattgtgagtgtccggggcagagggcaccgatcattcactccggatttcctcttattttgtgagatgctgtattgttcaggttgacctcaaacagtccccttaccttctcctcccaagcgcttcgattgcgtgaaaacaacaccattcccagtttcaaccacagataggttttgtttttttttaaatagctttattatcatatcaaatttaattaccagaaaatgacatttcctgacgataaatttgcttcctcacagaaatatattttccaagcttcagtttacattaacttcatttattcagtgactatttatgaagcccccctaggtgcccagccctgttccaagatagggagctctttcttctctggtggatactaagtcgttatgctctttattgaagactttattaaagtgtcagtagcagaagtggccacatgcacaatgtctggcttttgagttttatgtttaataaagatccacttaataaattccagcaagaaattaaatgctaggaagtttccagaatgatttattatggttccttctgtgaaagaatattgccttgctacagaggaacagttaaacctccagctaaggcttgaattatcaccctgccagtgtcatggcctgctcccttccctctcctcctgagcttcacatttcctccagatttctccctctctctgcctccctccctccctttctcccccccccaatatctctgtgtctgtttctctgtatgtgtgtctctgtggctttctctgtgtgtgtctacttctccctatctccctcccttcctcccccatgtccttttctctatctgtctgtctatctatctatctatctatctatctatctatctatctatctatctatctgtgtgtgtgtgttttatctctgtgtctctttctctgtgtgtgtgtgtgtctctgtttttctgtctcttctgtgtgtgtctatctcttcctctccccctccgtcttcctttcccttccttgctccctcccccgctctctgtctgtctctccccaccccccacacaccagaatccttttcagaggcatagctcatgataaacattatatttgtctttacagtttatatagatgggtaaggcataaaggaagaggtcgaggcaatgggcattcccaacactgacccatgacccatgaggatgtagggaaactacaattctgtcccaggagatgttgctcttactcctcaggaagaatggatgtgtgtacttagggtaaatgtaaactttgaaaacctttgaagattcgagttttactgtcagatgtaaatagagttcttaattggtctaagtaataaaaaacccggagtccgatactgaagaaatgcttagagaccagagagaaggagccagccatggcacacccaccttacctgttagcatctcagcagacaagagagcgaattgctgtttctccccgctatatcacttcttgtctgtctgtacagacctccagacctctatggttagctagtggcaagctccaatctgaccttcagacaggctttatttctacaagcaagataccaccacagccagccaatcatacgttgttgcttcagaggtctgttggaaatctttaagcctatctgctctagctctccagtttttctggaaattaagtcttggattttaatgaatttattcagacatttaggtggcacatgtcataggcagagtggaagtaaggttcccatattccactctaatcatctttctaaaaattttaagttagaaaatattgagaggcttatgaaatatcgttttctaaagtatcaaattaacaggcatttttgtgttagttggttctgagatagggtctcgtgtagccttggttgaccaagagcttccaatcctcctgcctccatctcctttcagctgacaatatagaggtcaccaccaatatggattcagttagacagacctaacgattcaattgccatcatgtgccagacattggactggactgggtgttgaagataaactagctaatgagtgcatgcacagaagagcagaaacactgctcagcaggccggaagcactcagacagtttcccacaactgaggaaagaactgcctcttcctctcagggtttgcagcatccagagaaccagtaagtatatctttatcaaatcaaaaggagagttttgcttcagacccgcttgctattgggtagagccttcagaaaaggccggaagctagaactgccgcagagttgaaggggaagaacaatgctgagactccactctgcatatccacgtagtcagtagctggggctgctacttgtccatgccaagttctgtgtccacagggcactcatcaaggatgcaccattgcatagacacagctgcagcccactggctgttccatccaggcaaggcccagacagaaaggcaagcacagagtgtcttcagatgtgcaccctctccttcgccaggctgtgaaccttcctccgctgtctttgcatctggggaggggtgggtctatcatcctttaacatggttcctgttcacactggtctactcactagaccactagactctagtgctttctggtgagccctgccatttctttctggaataataaaattacaagcataacaaccattcttaccatgcatggttattactcacaaattgtgccttttaggagaaatctaaactttgcaagctgcccacttttatatatttgaatccggcaccctaattaatcgcagctgcctttcccagagaaagaaaccctctgaataaataaataaaggatgtgagaagggacactaagctctgtgacagggatccctaaagtcttcactttccacctgaagctaaggaaacccctttaagcagccctcctgctttctcaggcctgtcttcttgatgcatggggggagagtcttacaaagtcacatgatggcctctgaggggggctagggctgtactttattatgtgaaatgaagcagtaggctgaaactctgtaaatgtgtggtttgctttcattatttatttctcatagaatacaaacaagatgcctccaactctcgctaaaggctgggaccaccatgcggagctctgagctctagccatgtgtggcatgcccagcctctctgctctttccctgcaccctgtctctaatctgtgctttctcaccggcatctcctaaacagtggggtctccatgtgttttcatttgcctgtttctagcaactagcacagtactgtgtacttaaagacagagacagaaggatcatgagttccaggccagcctgggctacatcgtaaccaaagactggcaaagttttctcagcccttggagcacttaaagtagttaagtaaataaatggtttttcttatataggtaagttctttttattttatcttgtcagtttacaaaacaataccatatttcaaaaaaatgttttacctactcaccagtgtttttactcatccttcctaatgcagaggtcatcaggcatctgttgggagaagatagcggaaatatggctattggtggaccctgtagctcagctagtgatacagggaggaacatggtgttaactgtaggtgtgctgtgagggttcctataagtaaaactcagactcaagtagacactggaagtttaactaagtcagagtcatactatgccttgtattttgaattatgataaatatttttcttgatgcgtgcaatttttctcctcagtctggctccttctgtaatacatctatttaccactgatgtcttggttgtatttattcacagcagggtttgttctctgcgacctgaagaagactgatggcttgaataagaatggcacccattggctcctgtatttgaatgtttagtcaccagggaatgggactgtttgaaaggattagaaggattaggagctgtggctttgtcagagtaggtgtggccttgttggaggaagtgtgtcactaggggtgagctttgaggtttcaaaagcccacactaggctcaggcacactctgcccacacccagccccatctctctacttgaggatcagagtgtggaactctcagctccttctccagcatcgtgtctgcctgcctgccatgataatgatggaccaaacctctgaaactagaaacaagcccccaattaaacgctttcttttataagagcttccatggtcatggtgtctcttgagcaatagaatagtgactaggacagaaactgatgtcctttttaggaatctatttccttcacatctccagatgtctttataatgtttgtgaaaggtttgtattgactcgtcttattctgaagtaccatgtgaccatgcgtatttttcattgtctgataaacgtgtgttgtttccttcagggggattttctatgggaggctgcatggcgatacatttagcatatagaaaacaccgagatgtggcaggagtatttgctctttctagttttctgaataaagagtctgctgtttacaaggtaagttccagatttaaaaaacaaacaaatgtaacatggaacaaagacatgttgaaactaaaataaagttgataattaagcaataaaatgtggtgcctagtcaatatagattaaatgttcctggaatccatggctagatgagacatgttgattccaggaggcctctctgttttcaatctctccttgaaaaggacagttatagcaaaagtatgtttagtattatatgaacctgtctactagaatgttgaaggctatagtcaggcttgcttattatgagtctactcagaaattaattataaagctgatactttacacagtatttaggctcacgactgttgtacacggtggcgttacagctccattaccaaaagttgaacagagcatctgaaggtgacttttcccttctgtagggcctccaatctgtacttctccctcttcctggaatcccctaagaagtctgtctttacatttcactccgtttcttgaggaagtgcatttgtggagtcctcggtggtgcacacatagggcacacactcacccagccctcaagggggcctcctcactggcatacagtgcccagctccatctgcgccacctctggaggctccctcttccttcacttacaggagctgtggcaaactgagagtcgttttctctgatgggttgtctcagccgactctctccaccttcctttaggatcttcagcaagctgagcgcaccctccctgagctatttcagtgtcacggcaccgtagatgagctggttcttcatgcctggggcgaagagacaaactcaaagctgaaatctctaggagtgagcacagtgtttcacagtcttccaaatctttaccatgaaatgaacaaaactgagctggagagcttgaagtcgtggattctaacaaagcttccaggagagactgtagggcagaatgaatgaatgaatcctcaccaccatattgattagtatcttacatttaacaattttttttctcatttaatcctcacagaaattaggcttggtgaaacagccagcattcccatcttttataaatggaatttatgatatctgtgtgttctccttccacaaaattgtcttgaaaatcatcatgttgtaaatgtcaactgtttattttgtggctgcatagatgccatggataaggtgttatttgcttgtccattcaccacagatttgggctacttcctgtgtggggctgtcataaatagggctgttgtgaggtgtaagcatccaccctcacagtggagaggctgggtgatgcattgccattgcctgaaactgtctaactgtttctcagtgtagttttaccattttccattccagtcagtgtggtggcccctggtgcccagttcatcatactttcatttggccattctggtggctgcatagtgttcgatctccatagtgtttgatgtctgtgatgcaggtttgatttccattttcttgatgacacagagtcctacactggaggatttttccacatttgtgaagaatcagtttgtcctccccaatgtgtttctagattgtctttgtgataagtgatttattgtcaaattataatgataaataaaatatgaatagataatttactgacttacagatttacttattaaaatgtctagttctctgaggagtaatataatcttatcaaaggtggaattaattgagatcaatatctgacattgtctttgagatgagttgttatgaacactgaaaataagcacacaaaataatagggtttctcatggttttcacacacatgtcacacatgtcacacatgtcacacatgtcacacatgtcacacatgtcacacacttcgctcccgaccctccctgcaccttctcccacttctcccactgattcacttgctcatgtcagatcgccccttctgctttcatctacatacatatctgtgtgtgtgctcgtgcttgcatgtgtatgtgtgttctgcacatggaagaacacatggtaacgtaacacttgtcgtctttttccatcgttcttctctctggtcccttccctctgggtctttcctttcctccacatagtaccctcttccactcttacatgcatgtctatggaaatcaacctagattcttcatacaagagaacatgtgatagttttctttgggtgtcatgcgtatttcattgaatgtaatctccacttccgatccctttattggaaataagtattcctcataacaactgtatattgcaccaaattctctttatccttttgtccatcaaggcttctgcactggctccgtgtcttgactactgtacacagtgctgcaggatgcatggatgttcagcatctctgtactgatttagatgccctcaggcgtataccatgagtggtatgtctggagcataaggtagttctatgctttgtttcttgaggagcccccatattgatttccataatggctgccctagtttatattccatcaatgagtgtttatttacatccatgccgacatttgttgtcatttcttttcttgatggcagccgtccttacttgagtgagatggaatatcagtgatatcgtgatttcaatgtagggctgatgatgggagtgtccaaggctttttgtggattttcatcagttccatctgataagaaggccctttgaatccttttctttatcagtcactgaatgtgaggtgatctttttaatggggccacaggatagagtcacagacagttctggggtcaggagcccagggtcagcatgaacccgatagcaaataaacagcttctttcaaaagtgggaggtgactgcttcctgaggacatcagggtccaaactgtggtatacctccatgtggaagccacctcacttttccttattcacaacctcaggtatacagactggaagatcaagatcaagacacagatcaagacacatatttggaagagaattgactcttggctcaagatggtgccttgctgcatgatagaaaggggacgggcaacaagcaccagggtgtggtgttcggtacttatttcatagctagacttgacaagaagcaatttactagaggaagggtttgtttttgttcacaatttgaggatggctggagacagtatggtggtaggaagacctgttgactatctgaacaggagcacaggactgcttgctcacatctaggcagattaggaggaaacatcacataagaaactaagctgggcaggctctaagcctcagcgtcccacctgtagtgacttatctcctccagctgggcgctacctcctgtaggtctcacaacctcccaaaacagcaccaccagctggggacaaagtgttcaaacatgtgatcctatgaagcacacttgatatccaaactataacaggattgcattggacctcttttataatattcctaatctgtcacaataatgtttaacatctaagataagagttgtggagggattgacttagtcaagctatagcattagctgctgcccatccagatggatatttacagcagctactaaagggtgggcccatgggtgagatgagctgaggtcttagcatgagagcactgttggaaagctgtttgggcatcttgtctttacagcagctactaaagggtgggcccatgggtgacatgagctgagtcttagcttgagagcactgttggaaagctgtttgggcatcttgtctcagcctgcagtcacctctctggttattcctcatgaagaagaaataagacagaaaaagaaagtatctccaataagaccatacgtgttagtcagcatgtctgcagcagttctccacggagtcccctcaaatctcatcattccccctcgggacctccagtctttctcttcacatacttcagctcttcagaaacagggtggggaattttcatgtgtaactttaactagatttttacaaagatgtaaaaaatatttctactattttgtgatgctatgtagacctcttgctttggattcattgtgaaaccatgtgatttttcactttgggaataaaaagagtggttctgtgatgcaggctaaacatggaagaaatcttgttctcatgtccataaaataacttacgtttggcccaataggctaatagtttctgttaccaactccagatatatatttgttcatttatttattttaagaagtgtgatttgggggtgggtgcgtaggtcactggggatggtacttgaggtttcaaaagcctactccattaccagttatctctgtctctctctgtgtgtatgtctctgtttctgtcttcctctcttcctcccttctgagaaatgtcaaaccctttcacagctttgctatagtgtattatttcctctgattggtgtgttatcacctcctccgagtgacaaaacttgaatatttcagacacgtatatggagaggcccatacccgcctattttaagcagagtcaatcttcagtgccttggtgggtctagaagcctcacatggtattaagcgaacatttacttagcttaaattgccatgaattaggacacagactttttacaatgatggtggtaaggtatttttacaaactgaagttctagctagggaactgagttctgtaggtgaacacacccaacctgaagccagactcacagaattccatttcaataaccacccagagtatatgctctaattcaaaagccacttttggatggctttgaaaaaatatttatcagaatgtaattacataaatctttgaaaataactaatagaatgactgatgggaacttgctgtacagggagttttgaaggaaatataaccctactttttagacagtccctgttactaatatgctgaaatgcttggaattttaagtaaatcatccttttaagacccttaacagtcttgcatgggttggggtctgggtgggtgaatatcttacatgcatgaaggtgagatccaggtgaggagaagactgtttgaaacatgttagaggagagccctaaggacatcaaacactgttgattgtaacaaggaacataaatactaaaacagtccagggatgtggagataccaaagtgcatagtatcgtcagtcaatcttactttaattggaagtatttgtatcttatatcaacaagagattagcctgaatgttcatttattaatacaacaagaatattaatatatatatatatatatatatatatatatattcattcacaagtttttagggacagatgtgattagttgatgataaagaaagaagatccattaagccttttggtgctaatttttgtgacaattgtcccaagattataatatataaaattggaaaagatcatcattttttaaacatatgacaaaatgctctccagggatgtgcaatcacagtgaagcttcatctcaagttctttgtgaactgtctgccacacctgacaagcctggcccactgcccttatgtggtaaacatcaacgtctatagacaactatttgtatattcccaagagggcaagggccacatcaaataactgctaatttgaatgtgtaattactttctatgaagcatgtaactgtcttctttttactaaatgttcggtcttttcagaactgtggattgttctctgtggacccatgttctccctgacacacaccttgcaaatttgtggagcagttggaatcctgcactgttgatcaggacgcaaactaatgtaatcaatatggaaagcaacatgacagttgttcaaatagctaaaactagacgtgctttatgctttattcgatccggtgggtcttctaggtatatatctgagtaaattaaaataggatctctgagaattatctgtacactcatgatcatagcagcatctttcgtgatgacccaaatgtctatcagtagattaatagtaagcaaaatgtagtatgtttaggtatatatacatttttttcaacattgaacaggaagggaattctgacacattccccaaagtgggtaaaaattgattatgataagttgaggaatccaattacaaaaagacaaccactgtggaaggcatctaaagtagccaaactcataagaacagataatataatggtagggtaaagtagacagggaagagaagggagcccagagagacagagacaaagacataatagggatagatgggacaggaggaggaagaggggagaggagaaaagaggggaggagacacctacgagcaaaaatagacccttcaaacgaattcctccagtgatgtatttccttggtgtcagtcctgtctcctattgaagtctttacaccatcccaacagcccatgcaatgatagatactttttccttagtttcctctctggacctgacaaaaagcaattaaatgggagagaagtttacttcagtccatggtttgaagaattatggttcaacatggatggggagacatggagggctggggctgctcgctcactgtaccatgatgaagagaaatggagatatctgtgctctgctttctcctttcccccattttatcctgtctcaaatcatcagctcacggaatggtgcctcacacatccaaaatggttctttccactcctgttgaacctctatggaaacaccaggttctttccactcctgttgaacctctatggaaaccccatcgtagacatctcacaggtgattctaaacccccagagagttgccaatgaaggttaaccaacaaatccatcaatggattgatgagataagagctctcataatacaatcacttcctgaaaaaacatgtcctctgactgctgtattggggacccacatgagcttaggagggatttctcatacccaaatgtaacagatccttgagttttaatctccctgtatgaaaaagtgaacactacacatataattacaaccactgaagtatgtgcctaaatagttaaaatgctaacttttatgttgtgtgttattttaatactttaagaaaacaaatagggtaatacagtgcaacccactatcaacagtgaagacatgctttccatggaaggataatcacttcccgaaagtactgccacacatagaagatgagaggctcaggtagacattcccaaaaagagactgagacagtgggaagattgtcgtaaatatttaccctggtttagacgtgaactcactagtatcctattaagtccagttcagtaaatattttggtcggtggattctcttttaagtgaaggcaataatattaacttttaagattgttttgagtggggccagcgtgatggctcagtcagtaaatcagttgccttataagtcctaagactcaagttcaatccgtcagaacatatatttaaaaaataagtcagatttatcatggcttgtggttgtaattcaagtgcttgggaggcagagaaagtcatgtccctgaagcggcttatcaaccagcctagcctacttgatgagctccaggccaatgagaaagcctgtctcaaaagaacaaggaggattccatctgaggaataaagctgaggttgtcctctagcctagacacgcacatggtcagttatacacatgtggaccccccaaacacacaaatacacacacaccaaggttattttaaggtaaggctgaattaataaatgtaattttattgggtatgtaatacttagcctagatcaagtttgggtttttttgtaagacatagcatgcaaagcctggattgtttttatcactgaagaacactatggaatggttcctgagataagttatgactgcaaatagacaatagaaaatgtatgtggagcctgtagtgggaacgaaggttgagagttttacctctactttagaagcttaaggttactcatttctttatccctatattttatgagtataagaatgcaacaaaagtcagagtcacttaaaatgatgtaaaaacaagatgttttcacactgcctttggacctgtatctccgataacacatgatctttcacttgtatgcatcataactcactttgaccgtgatgttccgaggaaaagattaattagatgttattgggattgactgcaaacatatggttttagattgttgacaggacactttgcagagaccggagtaaccacaccatgaaatcccgcactaacccatgtattcactcatggctacatctgtaagcaaaaatgtaaacatctgaaatgctgaggtgacattcttgaaacagaaaactccttttactcaaagcatgaatgttctgaagttaatattgaggcatctctgattgctaccagaccccaccgaatctgaagtgaggctgtgaatccagcccattgtttatggaacataatctaattacctatagattaatgtgggaaaataatccagcatttaatgtgacatcagtgaatttttaatgcttctgtgcagtcttttcatatctgttgtgagcaaaaagttcttgcagagttatagagaaaccaagactgccagtttacctgtgtgtcatatagacagcattgtgttctaaaagaatgctgcttacttcctacataggtttttaaggcaaatgtattatgtatctgagtccctgaattcaagcataatcttaggttggaaagacttctctcagccattgtgagaactaggtatacatcccctgctttatgtaggaaccgcaccaattggtaatgttcctgtgtacttttggcacgtgtgtaaggcgccaagagaagaggttgacattggttttcaggcccaacatttgtttggagtgccagaaataattgcttttattatagtgagcttaaaccagcattagcagcttttctatcaaagaaattagttcttatatggatggccaataaataaaattgttatacagtggaataataggaacatgtaatgaaacttgatttcctgccaagcaaacatatggacataaatgaaaatagaaaaatgtgctttttatggtccatatgagtcccacgagggacggtggaaatcatctacctacaggtatctggattctgtccatttagaaacaccaattctctaggcaggggactgctcttactgtccagggctattggatgggagaagatgtggtttcctgtggcgtgagggaaaggggaaggcagagttttcaacagttgccaggttttgtttaacacatttgattccacactgcgatgctaagcttcatgacatagtcttagtaattacagcatttggtactgtcccaaagcaagcgaggaagcccttttgtatgagtctaaatctgacctcatgtttctttcagatgactgtggagctagactaaagcagtctagtcatttacataagcttgagtccaatctttttctttcttgcttttcttctttttttataagcctcaggatgcccttggtcttttgtgggcatctaagaatacccaattaccaatttcaaaagtggtggaaagccaactggatatacaagaatatgtggttttatgaatgtagcacctaaaaccacacatacatacatacatacacacacacatacacacgcacgcacacgcacgcgcgtgcgcgcgcgcgcacacacacacacacacacacacacacacacacacacacacacacacacatatatatatatatatatattatatatagcatgcatgcatatgtagccacttaggacacactgaacaaaaaagtagagctgttaactcacattccagccaagaagtttcaacctaggaaatgatgggttaaaataacataaaaagtcaggccactactgattaatactcatagtcttcagcagttctctgaaatttgcatgtcattcagaaaatgtccaagtgagctatttgctaaacaaatcattagaagaataaaacacaaatcactttaagcttcgaaggtcattgtttaaacatttggtgttttaaagtacaacaaagagttgtctgtttccccacagatgacattgtcatagttaaccaatctgaagctcttagcaaacattaagagtgtgtggaagaaataaatggtgcaggcatgttttcaacagctaccaacaattttgtcaacacattttattggctaatgtgctaccaaggctcacgacacaagcaatgcaagtaaggacaacgaaggtctggcctcagagcagttttaggatattgactttacgtggttagttttgttatcttgtgactgggtccacttacatcttcactcgcctatcccgttttgttggtggtggtttttgttggggtgttctggttcctttattggtctggttttcatgtttttgtttgtttgttttttaatttcaggtccgacttctcatcctcccagttttttgagagcaccaaagctgagctgggctcccgggccttcttatagactcgaagaggtccttgatcatggctcttcgtttatacccccttcttcattattctgtctgcctattcagcttccacctcacagtgtgctctccattgtggcagaatagcatcatttaccacttggtcctcagcatgtagtatgatccttgacatgtacaggatccttggtagacactggatgaatgcaatccttagtgtatgaacaatgattgaatgggaactctaagaactctgagatttgttgatttcccgaaagttctgtgttttaggaaaggtccagaactttcgggaaagcagaacaaatctcagccttggtctcctcaaattcaaatgagagcatgggaaagataatttccaaaacacttggaatctgaagtttttactgtgtctcggttatctctgagagcgagccctccatcagaatgtcctttcctttgtctcaacaatatgttttgaactctgtgtaccatgactaagctgggttgactttgataagtaaattgatagttaatgcccaagagtaatcatctattcaagttctgaggaaagatttccagttattttacagatttagaacacataatctgcctcacaggtctgagaccatcagagaaaaacaaacagtgaatgataaagtaggggcctgactgagtcataccagcacacaaagtaatagcacaaacctcctctcgtttgaaatcgcccttatcttgcacagcatggcggcacacacttatgtacaccatacaggggattctgaaatgaggttgtgagttcaaggccattcttggctacctacaagatcctaccttaaaaaaattaagtgaataaatagacaaacaccttagtataaggagtaagatgattcatttttgtttgtcaacttggcacaagctaggatcatctgggaagacagaacctcggttgagacaatgctcccattggacgggcttgtaggcaagtctatggagcattttggtgatcaatgtctggtgtaggaaagccaggttcactgtggatggtggccccttgggcagttggtcctaacaggtataaggaaagtggctgctgagcatgaacctaaagagcacaccagtgagcatcattacttcatggtctgagcttcagattctgcctccaggtttctacttttgtccctgccctccctctatgacatctatggttgggatatgtaaaccaaattatcccgttcctctcctagctggtttctgtcatggtgcttatcacagcaataaaaagcagacaaataaaggcttacacacatcctcacaattattactgagatgaatatgttgtgactatgcaaattctctctgaaatcccccagagaaatttaagaaaagaccatgacagatgcgctctcaacatgcaatgtatgaccttgagaaagtatccaaaggggtgggaagtatgcactggtgtgtttcaaacagtcttcctagaaggaaacagccattggcagagtagggattaggatattaggaatgaagtgggggctacttgagcaagactccagcatgggcttgggggtgtgctacctgctatccctacagggaggtccacctcgcgacacagttgctgattggtagtggattctcagcttatgtttgtttgttacacattttgcagggtcgggaattggacacaaggccttgcacatgtcaagctattgctctatcaactgagctgggccaccaaccccttgagaagatgtttattgactcaataaactagcgaataggtgcacaggtagatttccataaagaggagagaaggccaaagatatagacaagttcagggaactggtccttgtggcagtgaaagaaccactggctgggcatatgggcagaggattttgtcagagatgtgtgttcatgattctctctctctctctctttctctctctctctctctgtgtgtgtgtgtgtgtgtgtgtgtgtgtgtgtgtgtgtgttctgttggcatacataatagtttaaatataataaattctaaccttaaagtgaaatttagatatcatattccaatttacagctaaactcaatatggcagaatatcagctcccaacaagtaagggttataatggaagttttggcggacattcaagtatgctgctgaacaggtcacaggattttaactctctccatatttaggctcacactaatgctaaattagaaccgttccctgtagcagcttagtccagtaattatgaaggatccattcagttcttcacactggtatgatctagactgttccctccgtgtcagaaagtaatcactggatttgcaggaagtttcttaagagcaggcagtgttaacgaaagcaaagtaagggctgaagtgcttatgccatcactagaccctgtcaaaaattaaggcagcaatctgaagtgctgaggtgaggaacaaaagacatatggaaaatcataatcctgatttaatagcactctgcactgcaaatgtgtgtctgtgtggattctcccatgcaattgggaaataagaactgatgaaagattggaaaatcacttgttccattacacatctttctggacctaatgatagcaatgcacactagtgaactgaataccaaaaggaatatatgtgttcatatgcatgcatgtatacatgtatgtatgcatgtatgcatgtctatgtatgtgtgtacatgtatgtgtgctttccaataaatttttgaaaagccttagtattatcaattaaatggagacacctttaaaatgcaactgatatgaactcacagacttaaggttttgcccaattctaaaagtatttactgttatctattgtggtaaatcacacgtagtcattatcaaagtgtgaaagaagggaattaaactgggggtacaaaaataaatcaggatgaagaacagtgtctataaaagaacttgggtataagttgttggtaagttatagccacaaagagtgattgaaagcagtaattcagaattccgttcagctctctgtgttggacaggacgctataagcatgggcttaaatcagtcataagcccctacctttccatgtacaaacttccacatctaatttccatcttcaatgactcctaggaggaaacaatcaaggaagacttgactggcgaagaaggctagaataaagaataaagccattccctctaagttacagaagctggtctacacagaattcttctgccctcccacactgacagcagcccaatgcctgcctcaccagataccatcagcactattaaacagcaatggctgtgtgtctttctttttcccaatgggagattttaatgggcttatctatgcctttcatccatgtgcattagttaatggaaatgatgtatctagagaattgactccagagactcttattgagataattattagagtaactataacatgggacctgaatgaccctcacatcccatgtgctaaagccttgctctcctgcctgtggtgctttgaggaagtagtcaactttgtcatctttgtaacatggtgatagttgctttatcattcagaatgtccctttctcttttcatggtcatggcagtcttaagaagaatgacccaagaggctcatttatatcttttgtttaaaatgttagcataggctttcagggacatttcattaatatgagaaaataatagaagaacagaaattgccacaagaactacagctcagtatttttccctggctgagagttttcacaaccatttccaggagaccgccttcttttgaagttatcacctcagtctgtggaacttgtctcacagaatctactggatttggtgtgatagagcatgtcactggggaagcaatggttgaggggcgtggccttgttagaggaggcgtgtcattggggatgggtttcaaaactcacggtattcccagtttccccctctctcagcctggcagttttgtatcaagatgtaagctctcagctgcttctccagagccctgcctgcctgcctgctgccatgcttcctactatgatagtcatgaaccaccctctgaacccgtaagccccaaataaactcttccttctataactttccttggtcatggtgtcttatcacggcaacagaaaagtaactaagacattgattttgctctaccacaatatttatgccatggggtgcctccttactgcagtttcaaagaaacagaggagatcagtgtggtctgaaacctctgaaccaatataaggcattcctctttagaagcacattgtctcaggtagttgcaaaagtggtagaaagctaacaccatcatgtgaatcagaggaaaattatgcatagccaagaaagggacacaaaactagaatcaatcccctttgagtaggccaggaatacaagataagcacgggtactcctacaacacttggatacatatttagaagagctatgcaaatagtcccctaccagagatgggaggaaatgccacagtgatttagaaggaaactggctacaaacatttcacactttatttgcaggtcagtttttctgaatctgaaaagtgtgtgttgggtggccggggtataaaagcagcccattgtgactgaaggctgtgatgcctgtgtgctgtgtcaagcaagctgggcccctcatgtcagtcctgttcatgactctagtcctatgggagagagttagtgagatggagtgctccttggatctgttcactttggcacgtccttgcctctcaaacatgtggtatcaagatggctccatgtgtattcgttttataaattctgatcatggctccagatctctgggaaccagatactggctctccccagggatgaccgatagattttatttataaacaacaacaacaaaatgtttgctttggggaatttatgtaaaaataaaaacacaagtacactttgcaagcccaaaggcaaagaggaagatgagccatctctgggaatcagtatggatgagaacatgaagtcaggaagggcagagcttcctgaggtgagagctgctatctgtgtgacaaagggacagaggcaagagtgagagagaacaaaagggagtaaagcaaggccgtgctcctaatgctgaaggaaaaggctttgcctgttttttgtttgttttgttgttgttgttttgtttttttggcgtgggggggtatgtttgtttgtttgcttgagaaacagtgaggttttaggcacattaacctgacgagcaaactgaacagagccttacactccgcacactgttatggaggctgggacagtaaatgacggtgtccatagcacaaatggaagccaggccctaaggacaggacggagcactgttattaagtgacctccacagtgacttagttagagaacgtgaagacacattcgcagcctgtgctttgaaagaacttgctcagtaagacatacagggaaagtcccactaaattaaagatccaggcagagacagaacaacagagctaatatgatggagaacagtgtcccagggagaaacaccaactcctactaccgaagcaacaggctaggatgccaagaatcctcagagtcccaaatggggacagaattctgcctcctgggcctcccctgtgggcttaatccccacaggagatacaggtctcagaaggcaccaatagctttctcgggcagggatatgtagaggacagttctgtagctgatgcctatttggaaactgggggtgagggtggatgtgcctaagagcctgcattccatccccacaactgaagagccgtgagtgagagtccctcttttgtcctttctttccctctccttccttccctgtgctctcttctctccctctgctcctctctccttccgtctcaccttgaccttttggtgagttagctctttagagagagtgtggtttctgtccatccgaaaggctccagagtcatggagcaatgaagcatcttctttgaaagcacttagacgctctgacgagggctgcagaacagactttatgctgtgcagtgccagcgctaagagtggtcgtctgtcctccactgcagctgttagagaaagccggcttaacccaggcttcaagtgagaggaagccagagcattcaatcttcagatttgaatgcatgtgcaaatacatttaatgacatttaaaatttaagaaagcaagggaacctttaataatgtccctcaggtttgataatgaagaaatgactttgcagtcaaagttgaagcacctctgcccatgtaagtggaagttgtgtgacatgttttactgttgtgaatcatatctggtaagttatagccaactaaacatgctaacttaatttagtagggaatagaagagagcattttcatccgggaatagaattatgcctataattaatttgattaatataaagattgaccaatatcaactccttctacaaaatctaaactataccatagacagaggaaaatagaacacagggccatggcttctggatgttgagaggggagacctctggggaagcttgacagctcttaagtcatattatatttaatggctcaaattaaaactgtagagaacattatcatggtatctccctagcctttgcctctctgttctccacaggactcccattatcagagcagcctggtggctctcctccttgaaggggaatagattatctgactagaagctacacccggaaagtaaactggaataatccagggggcaggctggcctgaaacagagcatgagggccctttcacctacaacgctaacagtgttgttcctctccatctgattgtgccagtgaatctggcacaagtgaagactgaagggtgacagctatcactttccttctccacgtcagtcacagtcattgttatcccaacaggaaggaactgcccacagagctttctccttatgacaacggcctcagtcaaaagaggcttaacaataattaatgttgtctacaagtaaatgaacattcggagtctggccagaaccttaaagaaaagaaaaactaggttagaactctcagggtcttctgcgatgtgactacaggtgtgtgaactgtgttcctggaattggtttgctcatttgaaaagtgaagatgggcctgaggaagagactttgtgggtaaaatgtttgtgagcaagtttgaaaaccagcatttggaccatcaaaaccagatgcagaaatgccacacaagcaccaatttacacaccatatacatacaggcaccaagataaaatgggggtgataatatatatacatggcaaatatatataataataatatattatttgataataatatatacatatttggcaaaactattttgagaattaaattagatgcacacagaagtccctaacactgtgcctgatataacaggtgcacaacaatcaatttttcttgttgataattgtatgatgtgttaagccagcccacagttgcatggtgttttgcaacctctagtacattagacacagtcaataaacattcattccttctcattccacctgtgctaaagaacaaatgagaaatagaatcaaaactaaggaggcatttctttacttgtaaaagtaaaaaaaaaaaagaaagcgtgatgtgaaaacttacaaaggaacatctaacatctgtcaagtgaaatccatgtttccttgagaaagttcaaggctttgctcacaaataaatatgaaatttatggtgcaggtttaagatcacactgggtggccctctgtgcctcctgcacaatactaggccctgaatatttcttaaatccaaaagcaataggtccctccttcagggtccagcttaaaatgttgtcaagagttatgagcggctgttagccagacctaaattctgcttctccggatctgcatgccttctgtggtttacactgtgactggcaaccagcaacactcaatctagccatctgggctcaaatatatgcaaaatgacaaacactggtaggagcctctgctctggggaggtaccatgtttactcaagagcaaggcatgacagcaatcgccagctgacacgtgagctctttcttaaggcagaaaatgaaatgacccatgtttggaggcttctagtaaagcctcatgcccttggcactggtttcagttttagaagaaaccaacaagaaatgcagtaggtgagtaaagggggaaagggaagagagggttaaaaaaaaaaaacctcatgaaatcagcttgagatatttctttttctccttgaaagggttatatgacggggccaatgataggcgtctataaagaaaacactatacctttcttaatacacatctaaggtttcattgttaaagactcaaagtttccaaatcagagaaaagtattacttcatggttcccaagtttccaatcacttaacatatgaaacagtgaggtggagagtcccggcccggagtgaaagctgtttgatgctggtgaggcccggacaaatgcagtgcagccctaaaactgtgctgctgtttaaaaagacatcactctgtaataaaactgcgtcctggtgctctgggtgatgaggtttgctccatggacttatgatctgtttgccacacctggctgctctggatgagtagcaggttgcaaagtcagagtaaacatgcagcttcaggcctggatgttgaatgaagcatgttaattttctttgcactcagaatttattttctctggaaagaagatatccacttctgaaggacgcaaagtgttaagggcattgagatatttactatcaaagtgactaaatgtgtcactgggaaacagatcaggtcttcaggtcccagggcagccatttcagctgtcataagggttattgagatgcccatggaatgcaaccaacagaaatgttctcttattctgtttgctctagggcaagaggctgtggtaaaagtaaacagctaactcaacactgaagaacagtgcagtgattaaaacacagtacactatctttacaaacagtcctgtgtgatcaccaggggctttttaggaatgatggataaataccatgaaactaaatcctactcgagaaataatcatgccagcctgtctgaccacacgacacacagaaattcacacacagagaggtaagctgtgtacatgtgacttctttgaatgagtaggccaggggctggagatgcagctccactgttcaaaacacactgctcttgcaggggaccccagaccagttctcagcacccatattggtggcgcataaccagctccaggaggatataatacctgtgcactctgacacacatacatgtacacacatgcatacacacacatacatactcacacacacaaatacatatctgtatacgtacacatatatgtatacatacacacaggtatgcatacatatacatacacactcacaaatggatgtgcacataaacaatacacacctacttacacgcacacacacacacacacacacacacacacacacacacccctaatcttaaatgtagtttaaaaaagcagccccgagtgtcatacctgactcatattgttccgtcgttttttatatataagtattcttttgggaacctctgtccccctttttgtcgtcatgcgtgcacacagacatccatcatttcagtggctgtgtatattatcatgccaatatctcacagtgaaaccatctcccagctgagcaacacatggttcctgcggccgtgctacacttaggtgtgcctattctgctgcatgtcccctggtatcacgagggcatttctccccgtcattatcttgctcctttagaaataaaccgtatgaggctggcgcagctcagcagaacacagtgcttgctgctcttccagaggactggggcacaggtctcagcacacacgggtggagctcaccatcacctggaacaccagcttcaggggattcaaagtctccatctggtgtccgcaggagcctgcacacagatgtacaggaacacacacacacacacacacacacacacacacacacacacatacacacacacacacagagagagagagagagagagagagagataaagataaaatagctcttttaaaaatataataatatacaaaccacatgtgcaaacacactgtgcatgtgcacatgctatacagcaggttttctctgacatttggcctttattataaaagggtagtatattatttatggctttcttttgtcactcaactttatgttttcaaaagtgaaatgtattgctgaggatatctcattcctgtgaaatatcccacaagccatgattggcaccgagtgattagaaatgtgtatacctgtgcctgtgttgtttctacgggcgccttttacacgtctgctcaaagcacaccgagctcatgagcctacaagctgcttcatcttctcaatcacacttggtaatgtttacctttgtttgtttgtttgctgttttgttttttgagacagggtttctctgtgtagacttagctgttctggaactcactctggagaccaggctggccttgaacacacagaaatacttctgctctgcctccatgttctggattaccaccacccagctggtaatgtttctctttttacttatttatattagtattatttgagtatggtggatgtgtgtgtgtgcacaccgcacatgaacaacgtgtagaccagaggttgatatcagacatcttccttcatggctcttcacttagttttgagacagagtctctcagtgaacctggctaggggagcctcctgtgtctggcccatggcactaagaattagaggcacacaacaataaacccacttttttttatgtggatgctgggaatccaaactcaagtcctcacttatgcttgccatgcaaatgctttgtccagtgagcaatttctcccaactcgtgtgttggttttttcccttcagttattctgagggtggtataggcacattacagggcttcaactctcattttcctcatggctcctgaagctaagcatctagtgatgttttttatagatatctgggcattttgcttcttgcccactttcattttcagttggtttaattgtaaaacttttacagagaaaactttaaacttgttgttgcaaagctgatgagagatattttctctcatttcctttcttacaatctgtagtatcgtttaagggaagtaaacggttgtattttagtacaagtttgctgtgtttttcccttttttgtatgatgccaactaagcttcatgaatatttttctttctcagaaggtatatctgcttaaaatcctttgataatacattggataagacatattaaatcttttcaactaaaaaaaaaaaaaacacaaagatgttctttcatgttgacttccccaaattaactgtattacttttctacttagttctatagtctacctaaaattgattttgtatgaaatgtcataatagtcaagaatggttcatgagtttaagcagttggtcctcaactggtggccatactttatgggaaagtgaaccttgtggacatcgggacaaatggcagacttagggctagagggcggggctcagtggctacaggctaggtctcttttggcccagagccctctgcctcttggctcaccaagaacctccagctcctgttgccacaaatagagcttcagcaaccatctgtccccttctgtgatggaatgtgccataccctattgttaaattatttgcttgctcaagcatacttacaagggtcacttcagaatcctaatagtttggccataaatcatttgggtttcctgtaccaggagccaaaattgcaatttaattttcttcttctccaaacctcatgtcctctatttccttttcttatcctatttctgtagataggacctcaagaacagtgttgaagagaaagacaagagtgacctactcttctctatccccaacatcaaaaggcggtctttcaataaatcacccgcaaacatgatggagatgtctgtagagccctttactagacaaaggaggcttcttgcactcctaggatctaagtgtgtttatcataaataaatgttgaatctggtgttcatcaaaatacagttctataaagatattaacattcagatagaaagaccgcccgattttgctgctctttcctttcaatgtcataacattttttaaaacatagccaggttcaatcctgatacaccattgctttcatcatggctggattccctttgctgacttttgcagacattttatctgttttcataagataaacatgcctgtcactttccttacttaacacatgcccgtggcagcttcctctcaaagctgctctgttgtggaatgagttaggaagtgtatcttcatgaatctgctctgaaagtgccttcgaatactggtttaaatatcgaggagagactatgagttgaaacatctgtgcttggagctccttcctcaggagaatatttagtaactggctaaagccatgaatgtaactattttgagtttctgtatattcttgagttagtgttggaatggtgtgtttttccaaactatttgcatttatctaaaagttcagtctatttacatataattgtttataagttcctcatgttttaaatgtttgtacaaatgtaagaacaaagaccttttctagaaatgtattttgagatgtttgtttggatggttgtttttgttgttgttgctttgggttttgtttttgtttgttttggtatgaggtactcttactcggaagcctggtctatcctgggacttgatgttgagcccaagctgcctcatactccagctcttcctattacaggctcctgagtgccggtgctgcagtgcgcatctccatgcctggaacgtcgtcagctgtcaatcatcacttaattctaattacttttcatgtatatcatgattatttttgatccatgagttattgtttagttttcaacatttgtggactccctagttatctttcttgttagcaatttccctttacttataatcagggaacatagtccaagattcaagtctttaaaattgatgggcctttggcttttggaagtgtactttactcttacattgctctgcaattatctaatttcttcattttctttttctggtgttctatagttttgctgtctttttcttttatcacttgtttatatcatttttaagaatgggtcaaaagtttttgttgtacttattcatttctgtagttttattttttgttttaaatctttgttttatgtacacgggaggctttctaaaattctgtatacttttaactgataggttcaaaaacatgaattgtgtatatcttactgtagaaatctatttttattggtttttcaaatgtccaccctagtttactttggaatgctatttgagcagagtctctttttctacttttaacattaaacactccctattcataaaggtaaggcctatacttttgatgcatcctattcttggatttcaacaattgtattgttctctggcagttttgtaattataactatgctaacatccttagccagttcttccatctttttgactctttcttggttctgtattttttgatattaatttatttggtcttatttcttgcaatgtcaggtatagtatgaaagacttgatcaataatttgatgctttagataatggtaattttatattctgtctggcagtgtgtctcgggagaatgtaatctactcaaatcacacattaaacagtatcttttttttttttacatgtgtgcgtgagacagaatttgtctgtgtgtagttgatttcccacttgttagtgcagagcccttctaggatctgactgtttttgtccacaatggtatcaacttaaaaagattttacagggccacatgaagtcacagtcatcaaaaattaactagcaggcaagtcacttctttctgaagtggttaagagttgggggtcatcacttaaggaaatgctcaacatccttagtcatcagggaaatgcaaatcaaaaccaccctgagattccatcttacactgttcagaatggctaaaatcaaaaacaccaatgacagcttatactggaaaggatgtggagaaagggggacgaacactcctccattgctggtgggagtgcaaacttgtacagccaccatagaaatcagtagggagatttctcagaaatttagggatcaacctacctcaagaccctgcaataccactgttgggcatgtaccctaaggaggctcattcacaccacaaggacatttgctcagctatgctcatggcaacattatttgtaatagccagatcttggaaacagcctagatgcccctcaactgaagaatggataagaaaatgtggtacatttccacaatggagtactgctcagcagtaagaaacaatgacatcctaaaattcgcaggaaaatgggcagaactagaaaaaaaaattctgaagtgaggtaatcccaaaccagaaagagcaatatagtatgtagtcactcataagtggataccagacataaagcaaaagatacccagcctataatccccaaccccggaaaagcttgtaccctcttccagaaacagatggaagcagatgcagaaatccagcaagctctggagtacaatcaagtgagggaggagcgataatatgaacaaaggactcaaaacctcaatggggaaacccacagaatcagctgatcttagctagtgagagatcactcactcaggtctgacaaatggggaacctgcataagaccaaactagactccctcaatataggtgacagtagtgtgactgggacaatatatgagaccactggcagtgggtctaagatctaacactaatgcacaaactgacttagtggagcccattctatatggagagatgcaggagagcccagcctagacacaggggcgaggggtggagaggtgcttttgtcctgcctcaacgagatgatgggacagactcagtagacttcctaggggaggcctcaccctctccatggagcagatgggagaagcgggggatggggggtggagagagtgggaggaaaggagggaggggaacctgggattggactgtaaaaaataaattaataaaaaaatagaaaaaaagaattggagtcataagtatttggaacttaagaggcttgccctttaaggataattagatcacaaagaaaacatcataaatgactataaaccactcagagagaaatgcaaggaagaataatttacatcagaatcacaggccacggtgataactatactcagaggaaaagctatagcttagtcttcaattttagagaagttgaaaaataaggaaacatattgccagcaacataccactacatgtcaactaacattcaaattaagtttttgtgtttatgatattataaatgttcatgtgtgtgtgtgtgtgcattcgtatgtctgtgtgtgtatgtgtgtgtgtgtgtatgtgtgtgtatgtgtgtgtgtgtgtgtgtgtgtgtgtatgtatgtgtgtgtctgtgtgtatgtgtgtgtgtatgtgtgtatgtgtgtgtgtgttcatatgtttggagggcagagttaggtgttgagtgtctcttttgatcacgtcccacttttttctttttttgagacagggtttttcattaaacccaaagcttgtagattcagttagaccggctggtcaatgactcaggggctctccctgtctccctcctgcacccctagtttggggattccaggggtataccaccacaggctttgacataggtcctacagattcaaacttcagatctttgtgcctaaacagcaaggggctttaccaacaaaatctttaaatctttaaatctttactgccacacagtatctccagtcagaatccacttacaagaaccctagatccaggactctgccacatatttctgatgaaaacataactgttttagtagcttacgttttattattagtgatgtcaggaaagaagacaaattgaattttcagaccatcagttggttgggcagagtaacttagttacatcacctctttatttttcttttttgagggagaagcatagccaattgactttacgggcagttgaaaaagcatttctcctctgaagtctttttccaacagctagatggagtcttggtgggttttcttgtttattttccccaaattggtacagcagaacttacatgtggctgcctacttgggcagtataacacaaaggcagtctttttcactgaagggcttcatacctgtgggtccgtggatgggaccaacgctggtttcaccgtcctcgtgtctgcatctgcatcatggtatcgagtggagatgggtgtttgttcaacagagccctggtggtcaggagtcatgtgtttgtgtgtgtgtgttggggggggggggggattctggaggaacctgggctgtgagatgctctttccttctctttggtttttaagaggtcagtgtgtgagccacttcaatgccccccactgttccctgcattttacaatgccaacgtgagctgcagtggggagcaggtttacggtgcatgccattcaatttagactctactagagcaaatgattgcaatgattgggaggaaaaaactggaaaataagtccctgatgtaaaactggtcacagggccaaaacagtagtgccaattatgatttcaacagcacaccaatgttattttgacaacagtcttctcaaactcatagagtttattattagtgagggtgagcatattaaacggtgtattttccccaaggcagccagttgtcttggtatttgaagctgatatttaaagtctccatttgtttttttgttttgttttgttttgttcactttcttgtgttcttacatgaggagaagcactggcagtaaagtcagatgaacacaaagaatgtctggaaggttgtcctagcatgggtgtagtcctgagatatacacaggcctttccctagcattctgcctgcctagtgtttctttccttgatcacgtggattagaagcagcaggttattatgtgtggtaattccaacactcaaacaataacggcttattacatttctcttatgttaaagttaggaatccaggccctataaaagctgtgccataaacagcatgacaagctcctttgtccagaagcagatgaatcatacacaaataagtactaaaccgtgactcacaaactgtgcaatgctgtcttatataatgggaaatgtgtgaagatttggggggtaaactgagtccccaacaattgggatccagttggggggcatggaagataacttcggggacatggtttctgatgctgcacagagatgagcttagccaatgctggaaaacattgcctgattgttctctgaaaacaaacgccatgcttacaggacactccatttttatattttacactttcctgggaacatttataactcccagcatttcttctgaacaaagagttgcacaaattcccttttcatgtttcccaaactcctagactgagttaccctgaatgccacatggcaagaacataaagtcattgcaagcaggatcgctccctaaacccccctccccgaccccacacaatagaccacttacctaattttcatgaaactgtacccactcacataaatttgagacatattcccacagagatagtaacatggaatatgtggccaaaggcagtcacaacaacaaaacagcctggcaacctgagccaacctctgtgtgctcccaaggatggggattctagctcatgcctggatgagttcatgccctggtgagtccagcctttgaaaaccaggaatgttgcaaaggcgcctatttgttggtggaagctgtacccagaggaaactaggtgggtggtgtctctaaggctgtgctcctccttgtgttattttattcgttgatcattgctctaaggaccccgatccatccatcccttcattctgttactcctttctcagcctttgctgccattttctagacaaggagacaatatggcagagaataaacgctaatacttaatttcactaggactgcacagataataaactccacaaaatgtatttgactcaaaaaatcatactgattctgccattcagaggttccatcagaaccctgtgttattccttgaaaattgttgcttttgcacaagaggaggctccgcaattcttcacttacccatctcattcaatcatgcatcagccaaatattcacgatgcccactgcctgccctctgtcaggtactgcgcatggtgcagaaggctctgtggagttcacatcttgctccccaagatgcatctagactcaggagcaataccttccagtgaagccacgattcatctacagcctaatttctttcactgtaattacaatctttggatgagtttcctgatcaaggcgctccccacctctgtgacaagccacacaaaaccacctttatgaaaggcttattggaaggaaaagatgcaatatgcctgggtttctgaagggggtgagtgatcagagactgtcgtggaggagaaagcattaaaaactggagagcatgggagccaagactaaaacagttcttttttcctggatatgaaaacagagagaaggagaaggtgcccgcgagtattgtatagccgggagtagggagcgggggtgatacctgggctgagtaactgcttttatttatatggtatgtattttaaacttgtttttattgccactgaataagaaaatgctttagattagcaaaacatgggctggaggtatgccaggaaaaaaaatcttatatagtgactaattcatttgaaatgatccagctcccagacttcccaggtagtggaaacagtgtggtcatgcatagcctaacagaatagtagccacctcagtgatttcttcagaagggtaaatacacagaaaccaaaactctaattactgtgcttcaacaaggacattttagtggccatgtgtggatcactgacctgtggacacagcatggccagtgccctcttggaacactcagcactggacttgcacagattgttgctgtgagagaggagatgggcacacaagaacccacactcatggaggatgtgtagctgctattcaaagcctgtgtatcgtgacccctttggcaaacttctctctccaaaaatactgatgttaccattcatgacagtagcaaaatcacagttatgaagtagcaacaaaactaattttatggttgggggtcaccacaacacgaggagctgtattaaagggtcacagcattaggaagagtaggagcactgctaaaccataggcagttaatcgttgctgggtgtgggagagacatcgccttcagtgcggtgtgcatgttgtctgtgctcctttaagtgaccccatgtacctgtaaggaaccctaattgaatccattggttcaccacaccaaactcgagtggaataattcctttggtctgtcattgtgccttctctggaccaaagagatgtttgttcaagactctccagcaatagttcacacagcaccccatttaaaatcgttctttggtgttttagaaccaagtcaaactatctgtactaacttaatggcatacttattttgttttataaatatctcagcctaatggatggttggaacacatcttgtctcctccattcaaatttttactcctagagatttaaaccgataaactgaagttttactctttataagctgtgttgactataaacatatcataaattataagtataataatgtgctatgaagaagcagaaattttctgagatagatggcaacatcttataaatacactcttgctggatttttttttaaatctcaagaatgaagaaaaataggaatgtagtcagatatcatgaaccaaatgcattgcctcccagaagtgacgcagatgaacatgagggcttgtctgttttgtttttaggctacgctgggctatcatgcttgtttaagagcttaaatctcatagaatgccagatatgctcaaatcctaagctatgatattcccaatagaaggagggccaggaagccttgcttaagaccaccttgaaggtatagttagagtccagctggagaggcctccattcatcaccaaaaatatacactggccccagctaccagtaccaagcagtactgtaggaaagagaacagctggaaaactggtcagtgctgcattcttggtcctgctccgtggtcgcttatgggatggatatgaatggcatttacataagtgtcacaaatgtgagcacaatactggtggagtctaacgtgtgccccttcatgtgggctggagagcttctgagtggcgtctaattcatgcttcctgtttcatggtagttgaaatgtttctttcttgaagaaatttctactttggcatcttccatatattattttctactagatagccagctcaatgagttgaagggattctggcctattgtaaaaattatcttcttgctgtgcattgaaaaccattgccaatgaaaagttagtacatttattgcacaacacatgtccatttttaacattttgtaaacccaagcaagtccttgcctcctgagatttgggtccagactcactgggtttcttctctctgaccacttttcctgggtggtactggatggtcacctgccaagaactgttgactcgcaccacagttgaactgaagggaaaatttaaaactctcttgaaaaaaagcctgccagggtgaggggaaaaccagcacactggacagagaagctatagtaatactgccacaaataagggccttaataccatgcatttcctgctaaggatattcttcactaaccgttgacacccgaggatgcccagccagaagtaagaacttgggcacacctgaaagctgcccatttaccaagtcaaacacaaatccaccaacagagtggagaagctgtgcagactagaggtgccttgaaacctggcattggctggcagataacttatggagacatgggaatgacccctagaggaagccaggctaaaaaaattgagaataaatatatatgttacatattgtacatttatatatttgcatattttaagagtggttggccttgttgatatcttcattcctccatattaaaaattctaccttactcctgacattgagccaggccttcttcacaagaatttttaagtttcccttccgttcaccctgtgctgcaaagcaaccgttctcagcaagtgaccatccactgctgccctgagaaaagcagccacttagcaggctagtgagtcctaattgggagacagtgagacgtaaaatgtgcttctcgaaagacctgctgacccaagttcaacccttggcacccactttaaggtggaaggagagaactgacctccgaagcgtgtccattggcttccacacatacaccacggcacaagtatacctgagcacatcattctcccccccacacacactaataattaataaataaaaattaaaacgcataagcagagccaatagataggtattgttgattaactgtggtctaatttttttataaagaaggaacaagggactaaacagaaatgtatcagcaacacaaactctcagaagaaaaagaaagaaaattagaaggcagctgtcacaccatctaaaatgttcatcactgactacaaaatcatgctgtgtgttgaaaagatgaaaagtatggcccagactcccagagcagaagtatctagaggccagcaggagctcgagttcacaaacaaagttatcagagcagctactgttaacatatacaaggaccgtgttaaagagctgagcagaggatggcccagcctcagtgtagaaggaatacggagacagatgagaaatctctaaagaactgcatggacaatctgaaagccaatgccacacgctaggattatttaccacactttctccccacatgagctcacttttggtaaccgcaaagctgagtcatttccagagaaagtaaacatatataaagtccttaccgggaggctgaacttacttgatacaaccgccataaaaacagtgctttagatccacataagatcttccttgtatctctcctatgatgtcatgggggctgccagctcgctctctttgatgttagactttttcaatcatctcatttagaacggcaactcttcttgtgatttcattcccccgaccccaaatctgagtaaataaataaaagtgtgttgacttggatttaacggtgttttgcttaggcacctgatgacgatagtccaggatgattcagttgactggtgtgtgtgtgtgtgtgtgtgtgtgtgacagaattaaatgactaatgactgggaggtgggatgctcagttctgagctgacaagcctggtgccttagtatctgagccctcactttgggccagtggtgtacactgggtacactggaggccctgtcaactcagacataattgccccataagaaggagagacacacttttcttcaagcgggttttgtgtgttttatgtatgttgtttctctgagcgtggaagaggatggagtgagattttgatgtacagtttgagccaaatcttgaaaagagaagggatttttttacatcgaaaatactgtgaagaggggaaggagagtccattctgtcagactctgcaaacactacacccaaattcacaaaaggagggacgctcagcttgtgtagggacacgcagtctgaagaattcttggaaatgacaggaggaactaaaggagacccaacaatgatgaagtacaaaaccaaaaatttcttatttacctggaaaacctgaagcataaaaacccagcccagaggcagggggtatggcctgtgagctaagagcacctgtgttgggtaactcacaactctctgtaactttagccacagggatctgatcacttcttctgacttctgtgagggatatatatatatccctccttccttccttccctccctccctctcctctctctaaaagtaataataaaaaccaaaactcttgatcccatttaaatgttgaagagaattggggcaaagacaccatcttcctctttagacaacaataatcctaatgtaatttttgaaataattgtgatatggactgtttataataaggtgttacatgtagccctcccttccttgtctgcacctggccttggaaaacccagtacttttctcctcagtttgcctttcagctcagggcattcatctttgagctggtccctcttgaagaaacaacatgctcattggacttgtcatcgtgtctcctactattttggtgaccattttctgtgacagggaaagagctgctaatttgttgctgtaggagatgaaggccttgcggccacatctggtgaattactgccttcctgaccctggaggtagcagcagaacatggcattgtttggaattaaggggaaaaaaaacagcaaaggaaattgatttttacattttctacagactcttaaaaataaagatctgcaaaccaagcccttatgaaagcccccattgtctaagacattgagtcaagtcagccaaaggacaaattaagcaaaaccccttctagtgtcttgatgggaactcggagaggtcactgtggcccgattgtgtggcttagcttcttggccctggggttcagccatgtttaatctacaaaaatgtgtgatgatacaatagttatcttttaggcctcttggaaaaatgacaagtaggactgagtctgccttgagtggatcatgttgcacattggatgaaaaattcagtttagcccacttcagatgacacccagacaggtctttctgcttaagaagtatggacaaggacacatgtaggaaacaacagccttcattataataacttagaaggtttgcaggtctgtaaattcatgttttgtgtccatggtaggattgctggtgaacaacctttatcacatcaataccatggggaattgcatctggatgtgtgaggcaccacagtggctcccacatttattttctagttcgaaaaccaagagatgaacctggatgaataaacaggaagaatggagaatttttcacagttggaaataagaggtaaggcccaaattaaccagtgccagccatggtggtgtacacctgtaatctcaggacatgggaggctgaagaagcagtttggatcaagagtttgaggtaagtgttggctacatagtgaacctttgtcttaaaaacaaaacaaacaaaaaaaccaggcctaatatttgggaagagtattgatgcttagagtgggttcccttggtcccagcagagcagcaatccatggtcacaacataagacatgggccactaaccctgcacaatccccaggtggagctgtcaacttttcacaagaagccttgtttcctttctctggggactctgttcagcatgtggagatgcttcatctgttgttcacaacaacaggcccttgcaccggaagctgagaatgtccagagactttggtaagtttgttactgttcactgtggtgagggataggtgggggaaagacaatgtcataaaacagggagagagatcccgtggattttgaaatcattctgcttagctaactcttggatttgttccacacaaacggacaaaggcaaagtggggtgacaaacaccaaaggcaaagtgaggtgacaaacactgctacaaggacagttgccaccacagtgaggagatgagagggagtcttccgctggaagccaaaggacagggtgtttctgaagccccccaccctgcccgtgctggatgctattctttatttggcttggtcctactcattactatggttaatgatttaccgttgatccaggtgttagaagcttggtccccagtgtatcggaatctcaagcgagtggggcacagtggaagtttcttagcattcagagtgcgaagggtgataagagcatggtcccttcatccccctcacttccagacaatgatgtgagggcttttaaagtgaccactgcaatgtaaggccttgctaccggccccacaacaaccatggcctggaatttcctaaaccgttagccgaaatatacccttttcctttgtaacttaaatattagtcttaggtgcctgtctgacacaccacataagggacacattgttatgtctgttaacctgaagtcacttaacaaattggaacacacgaattttctctgatgccttcacgtcttaaaaccggaaaattaacattgtagtatcatttttaaatgtccaagcaaagattcgaacagtcactggcctgtatccacacatacagaaatctccagacttcaagtagcattcccagttctgccatgtttaaggaaatagataatttttgtcatcaagtctcacaggaaacgtgggactacagaagaatattaactaagtaatacgcattatctgccaaggccagggctctgataatttttcagttggttgtacatgtatggtagtgtctaatcattgcactgaacttatggcctcagggagtaaaaagggctggatgtgtttaccttctcttccaaacgttagcagatacatggggtgatgtcattgtatccaggcaattttctggatgggggaagggagatgcggatggaagcaggtactttctaacaggaagaggagcagatggtaggttctaataccccaggtcaataatacactctggtacatttaacacattcctgtgcacagggagagaatagaatgaggctcacagggaggtgtcaggcatgatccccagatgaattgaggtacaaaaagttcccccagtgagaggctgaccccaggatagtgtcactttggcttgtaactttggggacactaggtgaagaaaatccacagcaggcctgccttttggcatgggagacatttgagttcatggagtcatctggagcatggcttgaaggacttccctgatggatacgaagacctggtgtactcatttattataacaatgagatcattggaagacccataaaactcgagcttgctatccaagagcagatctcgtttgttacccaacagttccaagcttatttaacaagccagttttgacaagttgactttctttataagatgtttgtttaattgtagcagagccgtcctatcgtaaaagtgttttcaactgtgtggacaggacctggccagaggcctttttttttctagcaagatttgtacatctttcagatgaagacattctgaatcccattttctttgggagtctatgacaagattccaacaattgccatggctatgctaaaactcaggaaaagtgtgggaaatggaggggacgaacctgtagataggcggctccttctggtgggagcaagatcactaaaggtctgctaacaaatacaccaaacatcctccagcgcttcctgaagccgcagcaggtttgcacactgtgtggacagcgggttctcagtggaagtccccatgttaacagtttatagctgaatggctttctcatcacttcctacttcagaatttagtccaaattccttctggaccttcactgagtggcatcttcccagagtctcatttccatgtgtaaacacaatgataatacctattccaaaggcttctttgatacctaaaatataggtattttaaaagcagcaaaacactggaattggaaactatcattctcatcgctttctctaatgtatcaaagtcacctatttatacagataggtgcctgcagttccagagatgaagctctgagcacccaaaagaaagcatccattctttggcaagcatctcaactggcatttagcctcctttcctgtgttagagaaataaaaaaaaaatcattagctcataaagataagggcaacaattgctaaaagtttcaatatatttacttttaaaaactggaagagtgagtgaaaacacagtgggtaagataaaagttaaagctctgattcaactcaaggaaatggcaagaaatgatcatttaccctggaagcatccagaatttagaggatgtaggttagcagcaagtgggcattagagccccatatgggttcttgtcttccgtgtaggtgttcactagggtgtcatccaggtgatacactggctcactgtaaacacttccaggaaattaatggaagtgacaccgtaaaaccatgagctgtgctgtttaaaaaaataatagagcaaattcatacttaatccacttagcataaaattatgaaaagtgctttctcaaatcatagttgacacaaagaataagtttctgtttggaagttttcctaaagaaacaaacttaaagcattcatatttattattatggtaggtgtgtgtgtgtgtgtgtgtgtgtgtgtgtgtgtgtgcaggtgtgtgagtgagtgtgtgtgtgtgtgtgtggtgtgtgtgtgtgtgtgtgttgtgtgtgtgtgtgtgtgtgtgtgtgtgtgtgtgtgtgtgtgtgggatagctggggtcacacctgtgccaaaactcatatatggagatcagtgggaaactctgtgaagtcacttctgtgtcaagcttatgagccttcttgtcggccctcaaagaaacaaatttaattttgtaaataaaatctctctctctttttttaccttcttcatctttgaatgcacaggatcaaaaaaagagagagagagagagactcatttcaagagtaattgaaggaggactgacctctctgaaaaataaaatcttctttgtaatgcaccacacattaaaagcagccacagaatacgccccctgaagatgagtgacaatgtgacagagcttcacaagtgcctggtccctagacagacatgagcataatggaacagtggccagaaagttgtgacaagagaaacatacttcaatacacagaaaaacacaatctgtcatacccatacaatgaaagataactcggccacacaaaaggaatgcaatccctgaatgatatggctgagcctcaaaagcattaaactaataaagaagaaatctaggtagctaaggccacataacatagaacggcatttatgtgaaatattacaaatcagcaaacatagaaagttagtcaagtggagattgcccaggatctgtagggagagaaacaggcaatgctgctcattagcatgaggatgtcttttagggatcactgaaagtgttttgaagctagtgagaggtgatggttggacaataaatactatgagtgttttatgtaagagtcaattgtacattctaaaggcaattccttttatgttaatttcacctcacctaataggtatgtaggtgggtggacagagagattcgtggatggatagaatgatagacgcataggtggacaggtgaacggagaaagaagaagtacccaaaccggtaaactgattggaacggtccattgtgaaggccacagggtttctgacagctgccatgtgacagctgcagaaggctgggtaatggcctcccttgaagtgacaaataagcccttaggaccagaaagatcaccactgaacaatgggaactatttacaattgacaagggaattttttttcagtactaggggtggaacccaagacatccaacatgtgagacaaatcctctgccagtgagcaagactcctgagccccacaaggaaatatctgaatgttctcatacaagatcacgacactgcatttcagacctgattaggaccgaactcggtttacacttttataaaacagcatatagtttcagtttgggtgatatgacaaaggtcagaaataggtaatgagaaccttccgaggctctctggcatctgtgagggtcgtgaggaacataacgggaagtaccctggtttctcacacatttttatctgaacttcacagagtctcctgcaccgtgcactgcatacaaccggagtcttcctcccctgatgaaaacagccgagtggacaacaccacctctgcttcttcgtattggtcagaagaaggcatgtggcacatcctgtcccaagtggagctatgccatgaactctttactgcctcctgctcggccagctctcaatcccaggaaagcaatgtcttccgctccattgctttgtcttaaccctttgtacagtgacggctgtgacatgttccatcgttccatggctcagcacctctgctttggcaccctttgttgtcttaattactttctcattgctatgataaaacagccttataaaaacaagttaagatggaaaaggtttattttgacttgctgttccagagggatccagtccattatggtggggaagacatagaagcaggctgggaaagcatgacggcaggaacagaaggctggctggccacattgcatctgaacccaggaaagagatagtgatgaacccgtgccgctgttcagttctttttctctacttatacagtccaggctcccagccaaggaatggcaccatccacagtgtgcaggtctccctaccttacttaacacaatcaagacaatcccccacaggcatgcccagacactcatctgccaggcgatttggattctgtcaagttgacaacactcactgtctgcttttcacactttcttccagacttttccatttcccctctttcctcttcattgaataaacctaccataaatttgaggttgggaaaggcaaggcagggagacatcttcccccagaacagccacacagcatatcttccacacatctgcttagattcattttacactgtgagagttcccataggaatggtcaccagagactcatgtgtttgaacacttggcacataggaagtgctactattaggaggtgtgtgctattggaggaagtgtgtcaccagggttgagttgaggtctcagatgcccaggccacacccagtgtgctactctcctcctgcagcctgtcgagccagatgtaaaactccatctccttctccattaccatgtctgcctgcacgctccaatgttgtcccatttcgacaatggactaaacctctgaacttgctagccagccccaattaaatattttcctttataagcattgtcattgtcatgtgtctcttcacagcaacagaaaccctaatgaatacaagcactgtgtggtcaaggtttggtttcttcactcagtagtaaccctctagagatgacttggcctcctctaatcacggtgatagtctttgtcttaaacacaggactatagatgatgaggcatgccacagacttgttgctcagacctgtcctcctctgtctcaggagagtggcccaataaagctcatcagcctgacaggatactttaaaagtggttcccgttgctgcctcattgtacccatgagtcagggcagttcattcccacagaggactgggagaagccacaataattttaccaaagcagatagaaagacagcaaacaggcaatgaaagttgctttacaacagtcctatcttctgagatgaaaacagaagcaagatcccattacaagcctggtacagcagcagcagcaacaacaaaatctataccaccaaatgtcagagggggtgtggagtcacattctagtcagcaggtttatagaggtttgtttttgttttgtaaaaccatatatactcttataatacaatcaatattcacctataaaggaacttttatgagcttaatagtttatggactttaaaactgccaaaacttggaaatgatcaagatacaagtaagtaaatacgctctggcataaccagccaaatagaattcagtaccgaacaggaatgagctacccatctcacacccacactcaggcaagaaactctagttaaactcagtgggttacacctaaaagaagacatgaaaactggtggaaacttgtaaagaagagagttacaggaggaggggtgtgaagaggagaggggtatggggagtgaaggctaagtccattttataaacatacaatctttcaaacagtttttaaaaagccatatggaaattttaagcatatactaagtgaaggtaatctgcattctccatacagaggccaaagtatagaaacattaaacaaaattaaaaataaatgaaatagaggactcatcagagattcaaggagggattagtaagcagagcacagatttacaacggtgaatatgcactgtaggatatcatgggtatatatgttctgtgtgatatgttctgtgtcatatcacaggtacatacattctgtgtgataccatggatacatatgcactgtgtggtatcatggatacatgtgttctgtgtactatcttgagtatatacacactaagtggtatcatggatacatgtgttctgtgtgatatcatgggtacatatgcactgcgtggttacatgggtacatgtgttctgtgtgatatcatgggtacatgtgttctgtgtgatatcatgggtacatgtgttctgtgtggtatcatgggtacatgtgttctgtgtgatatcatgggtacatgtgttctgtgtggttttgtgggaacatgtgttctgtgtggtatcatgggtacatgtgttctgtgtggtatcatgggtatatgtgttctgtgtggtatcatgggtacatgtgttctgtgtggtatcatgggtgcatgctgtttgtctgctcagatccacagtataggtatgaccataagtaaactaaaaggtgaccatcagacttgagctgacaatcatgtgtcagtggaaaaagatgctgacaactggaaaaggctgtgtgtgtgtgtgtgagagagagagagagagagagagagagagagagagagagagagagagagagagagagagagagagactgcattttctacttaatttagccaagaacctaaacagtctcttaaaacccatcctaaatgttttaaaattcacatttactttaacatgtgggtattctaatataattaagctttaaagtgaaccgatgcctctaaagatggcatttgtcacaaagtgccacaagggatgttctcatttgaactattctgtttggactgggtcggaaaacgctcagatcttactggatgtggtggtaaacacagactgcactcagtcctggcatggtatgcaggactgtgtgcctccagtgactttctttggatggtgtaaccctctattggaggcaccaatctttgtgtgaatgagacgtgtgtctgagggcacaaggttagaaagaatgagagagccaagtaaacttcagcaaaagtcaagagtgtgtgcttcatgcaaaaccctaagcaacactcagtccaggagcacccaggcctcatgctccgagaaagcccgggagagccagggccagaccagatggggtgatgtctgtgcagttcccaaaccagaaaatgccatatcgtgatgtcagatgtcaaatgttgaacacatgcattttgaccacaagaggcaggttctatagagatacttccggtagacatactcaagttcctgtgctgagggactttacccggtagccgtttccccagcatcaacactgtggtcttataatgacccataggttactctagcgtaggattgtcatctcaggcagcaaagccataaaaagaatgggtacaactggactctgccatgctgttattcacaggctcattggtttctttcttctagagttggcatcctatctgtgaacagggctgtgtatgaaatatatagtcctatagacacacctgcttgccaggtcctcccaaaggtcttgttgaatgtgctgagcccacagagaagttaggtacaggagttaacatcagtgggaaacagaaaacctggaatctctaactccacatctaccacttctggctgtaagtccttattaagttacttaatactttctcagttttcttatctatggtaataaaaagtcatgatacctacttcaaagggttgttaatcactagagccaacatgtggagtgcctagagtagtacttagcccagactaagagccaagtagcttcttgtgacaaatagcatcagaagaaaacaacagggcacacaatggattcaggtatttgctgtggaagcctagttatccaaattgatccctggggcccacatggtggaaggagacaaccaacccttgaaggttgtcctctcacttaacacccatcctgtggtatttgcatcccccctccctctccaaaataaattaaaatggaggtattaaaattagctttgcatacgtcagccttttgaagcattatataatgaagttcaaatcatctccgatccagtttttatctcagtcttccgggttctgctggataggctgtttcttgtttgtctgtttgggagcctgttgcctttcggagcaattgttttctatgctttttaaatacccaccacaataaaggcacctactctgtttcataggttattagccagtattatctggttttagccagtcttcaggtttcccagggtctcttcacccgtgatgagcctgaaggcacttatgatatcaaggatatgccactaacacacctcacttccatggaaagataagttatccatttgccaaggctgtttggccaatgatcgtcagagatctgcttgtgtctgtcttccctatgctggaattagaggagcacacgctcagctctcaagactttcacatgtgtactggacatcagaatgcaggaccctgtgtttatgtagctggcactataataactgaatcatctccccacccattgggttatttgaaaaataccaaaggacattgaatgcatgtataaaaatactgtagcaattaacacatgctaataaactaaaaattaataatttttaattttacttaaattttattttaattaaattaaatctttaaaatgaatttttaaatacaaatttgaagtgaataaaattatatttagagggttgagatagaagagggaaatgaaccctggatgtccatggaggagctactgaccttgtctggcagatggggcatcagaggcaaatactagagctgaagactcccagtctgcttcggacctttgcagtgacctctggtcccaaccacaagccacggattaccagtatactgtaaagattgttattgacttactgtgctattgacagatctgccactccaactctggcctcccagtttctaaagtttccatccattggcccttgaccatctcttcctcaaactgcaaaagcactgtcctaacatcatcaaggtgggacagctcatgggggaagatgctcctcatggagaccaagaccgaagcctcagcagatgaaaaggaaagcagctcttctccacagagcttggacgtctctagtctcagcgaagtatacaaggctgctcaggaaaaggcatggctggtgggagagggggtaaaactaggacgagacgtaggggttttcccacttaccccagcaaaggttatttctgataccatgtaaaatactagcatgaaagaatctccttatctaaatttgtagttgtagtcttcgcatgcctggatgaccactgacaatgcagactccctcctctgtcttatcccatggtgtggcagcttggtgtgctcatgtctttggaatcattgttttcctcatctgtcacattttgttctttatttaaatgcagattcaggaaattcgcattgaaattaaacatcttgtttcctatggcagaaagccagaaagaatttgtctttggagacagaccacaaaacacaaagctatgtttttatataatgtctttcctacttaatttcaccaagtgattagtaactgattatgactgagccaccagacacaagcatatgcagaaacgaatggcttaggaatgctaagacataatacatcaagaatggaactaatattggttgaaacagcttgcatttgaaatagggcacctaggataatgacttcatgccaagaggaaaaaagatgcccttggacaagagactgatagtctgtcttgttattggagcatgtccccccaccccaccctatccctcaagcctttcaagtctctaggagttgtatgtcaatcacagaactgtgagttctatgctctgattcatgggagatggccagtgctcagatgctcctcaaagcagccttgcttttttcccatcctgttcttcaggtgatcactaaaagggaagacttaggagaaaacactgatcagatatatgccatgaagggtgacaatcttgaggcatttgatagaggggtgtggccctttcactgccattaatcagacactgggaagacagagacttacaatccttgtctctaggatatctgcctttatcagagtggtggagtctctgcactcttacttctttctccgtctcccttaattagtcaggttttttaaaacacaaaattcccccatcttctcttcctttctattcatagatgtctggtgtttcctagattgctgtttacatcatgttaatttctgttcttaatagagaatagtatgtaccctcttgagcctgccatccaagaagcagcataaccatgattctctattactcttgtcctgtttgattggaaggatttatctagaagcttctttttcttgctattatttctgaggctgaagcactgaattattgtctctcaaggcctacttcccttcatgttttattgcaatccttgtgacgactttttctcatggcacaattgtaattaaaacaaaaagacaccatgtaatggagctcaagtggaggggtttttattagggggaaggggtcataaaagggggacaggagagactggcctctgaggacaggagcagtgggagaggggaaagagaggtagagagacggggaacaggtagacaagagagagagagagagagagagagagagagagagagagagagagacagagagagacagagagagacagagacagagagagacagagacagagacagagagagagagagatgggaggtgggcaggacccttttaaaaggaaacatagagaatatgcttaggtggtgctcttagtggctgaagctgagggtgtatcctgtcagaaacccacgggcaggtcattacagatgcctgaatactaaaaataatgactcacacagagaattgacatttaacttcctcatagatctggttccttgcagagattgatgtaggttaccatggaacaaacaggtatagaggaaagtgttcttggactcagtgtctttgggagagaacaatcaactatgtagaggaaaaggtggactgtaatctagtctacacagaggctgcctcctgggagttttggagcttggagggccttcttggggttccaggtcaacacctagtataaagcataaattaagcagtttatttttccaatggccatctgtaacaggagtactaataggtcttaataataaatttccaaagtcagaaaaaggggaaaatactgaacaatcagagagaagaaagaccattgctgcagtccccaaatcacattttcttcatgactgcttgtctggaggagttttcaatttttacttgacaagtgtctgtttcctttgttgaaggtagttggagattgttgcatattttgggtacattttttgtcatatgttttatttgcaaatattttcttctagtgtatagcttgtctttttacatgctattgccttttgggaaacaaaagttctaaattttgttgatgtctatattatttttccttgtatggattaaacttttgatgccatagttaagaaatccccgatagcagcagggctgttgaggatcagtgagttcgtttgcaagggagcttcaaaaaccgagttgattctcagtgcaatgccaagtgagcagcatgagaagaaataatattctgtgttacacaggttttcagaagaattgaagattcactgcagacaacagtatcatctatggctgcccattaggaattccaagggtattttagccaaacaccaatgaatatctggaatccgttctgagataaattaacataacatcttaaagtaggcctcagagagtagaattttgagtttctttggatagttcacatacatagcaagaattgagagtcattaaatggaagcaaggaaataagaggggtgcattttgtggttctatcaggaattttcagcctagtttccagtttacttgcgtctgttttccctgcagcccaccttcgtctagagagctaatctaagctcaggacttctctgggatggtgagtagatggaggaacacctgttctttcaccctgcctctacctacaaaaggctctcctggctgagccatagtttagatgccctgagaaagtgaggctgtcacaattctatcagattgagaaaatacaaagcactggggttctccacaggggggaggtggaagcagagtttgtgccaatggctccaaaatctgtaacaagactgggtgctgaaaaatcttccactttcaaaaccagcctgtaaagcctgggggaggtgtgtggggtgtctaacggcagacacagggaggagctccaagaatcataattagaaaaatagagcaaaatttttaggaaaacacatccaatacctatagaagtgaagatctttttaatgggctagcaaaccagctggtaaaaaagcacaatgatagacagctatagtcagacaagtaatagggggaaatgaccatgcaaggacacggggactgcacaggaagaagtgaataaattcaggaatggaacagagctcaacagaaaactgaatgctgacttcatcatgcctgttagctaagtactgagaaatcagagaaggaggagcaaaaccacagccacccaccctactcaacttcccagcagaaaagagagagagctcctgtcgtcttccaccttacggcttcctctctccacccagccacgtcacttccttcctcctgtctgtaaagacctccagacctctatggttaactagtggctagctctaccttctgatcttcaggcaagctttattttttagattataaacaagatatcaccaccaccagagatgtctgtattattcctctgctcctagggaacacatgacctccatggtcttcctctgtcctgggcagaaaacgtcggcagctggtacacaccttgtgagcttgcactggccatctcactgggctctgtgttgattcccaataaggttcttgcccagtctatgcccccagagcttatttcacaagaagagaagaaacagaaaatacaaaaggcatggcatgacgccatgctaactttgactcttgtgactatacccactccccttcaacttttctttgggttcttagttcaaagtccaagactgctagagcctttatactaggtctgtgtattctgctctctgcccccttatctcatgagctttggctaacactgtcattgtcccacatgtccttctatgtgtgtttatgacatgccttagcctacagaatctaacacaaaattctcactgtgccacttgaaagatcattgcagtatcacctcccagagtcttttctacatctcccaaccatccagctctcagctgacacccatctttcccagtaaatgacttctgtgctacccatttttggtaatatctgggctttctctttgttagcttatctttcccttcattttccctgttggcacatagttgtattaacacaacataaaatacatgataatgatgacttaattcatacgtggtaagggtttcctaaattccgaagtcgttttatgtccacaagatatcacacaaatagcccctcacattcaggaaatgtatgagcaaataatcttaataaaatactgacttctaaaactccaggaagtcattcaagaactgtatgcccagctcttcctgttgtaggcgtcctggaggctgtgcatcccagtggatggttaaattgtctgtgctaaagtagctgggcatacagtttgtcacaagtaccatgttagggtaaccaggcatacagctttgtcatgagtggagcacagggaagagaaggggagatcctccctgcacagtggtatgtttgcttgggctttcacccaaaaaggcatgtgggggaggggcttggtgacacctgcagaaggaattagccattacccaagcatgtatgtgaaaaggacaggctattggaagaaaaacaccctttttctgtgagtcaccctttaaagggctttcttaattttttttttgttttaaaaaattgtgatttaaaaggctcaaacagcctagggaagtaaatccatgcatatttccaacattatttaatatttactaagacatcataggttacaacaaatgaaactttttggctctctcactgaaattttctggccaaccatgttagtgactgttcctacagatagtttataactgtttcttcacctctctccagcaactgaagtacacgtccaaaggactcaggcatgtggttcacaaaccagagtcttagaaaaacgtatttgagattgaagaacagatcaatgatgtgaacaggcagggcctagccatggccactgatatcttggaaaagtgagcgaggtttctccttgtttgaagtagaattccttcttctgaacctgggcaccctcagagaaatgctttataatccaaagcaatgtttactttggattcagttcctcttttagttttcacttgtgaccttaggactgagctcacaattggaagcaattctgtcttctgtctctactattaaaaaattacctacccagtgaaaaaccacacaggactcatagtggctttgtcccaaggagatgctttgtgaacttgtgggaattatatttatgattcttgcaaatttcagctcaactgctgaggtagttcagtgaggttacttgagctcttagtaaatagaatgcacctagtgttcaattttgctctgtagcatactgagttttcttcatgtgacacaatgagtatctcatatagggatgatgggccatttttgataccatgtttgtgtttggcagatgtctcatattgaaaacccctcttagccctttggagttacatcttcattgaaatgtgagaagggctccggaatggctcaccaagtcaagcagaacctaccttggcaaatggcagttgtggattttcattggttttggttgaatactgtttggaagcttcagttttcagagccctcaaaggaagccagtgcttttccttattaatgggtttgttgaagggaccaccacattggaatgacatttctgaaatcttcaggaaggggtggagaatgtagaagaatctcctatttatttgctcatgggttttataataaacttttatccagtgctaacaaaatgcagagccaggggatgcacataggatcataacagatgctcagtgagaaccattttatagatgaggacattaagactcagataagtaaaataaccaacagatggggcagggctagataaagaagaagtgaaaacttaaactcttgtctgccactaaaaatagccagtttgctccatgaagcatcttgctcatggatgtgtcatgcatttgaacacatggccacagctcacaggaacaaccaagccttctagctactaagagaactaaaacatactactatatgaaaactctctctcctccacagtctcacttcctggcttcctctttcctaccattcaggatgtgttgtgaactcccaaggcaggcaaatgggaggcaacattttgaaaactctcagacatatttctgacatccttaggctttgagtattcacaaaacatttcaagagagaattctaaaggatgcctaaggaacagcagttcgggctttgcacagaggcaggaaactcatccttgaggtcactttcttctaaactgatgtattctttccagagtgataataatctttttttgaaatgcaggtctaagatggaaggaatttttatctggaagagtaatataaattagctttgactgccagtttccaccgattatgactttccaggcggaattcctacaaattcttgaggcatgacctccagtgaaaaaataaaacccctttaaaaacttgttgagaaattccagataactttcacaagagacttaattttagagcattaacacaaccttggttggaaagataaaactacaatgcagttatttggtagaagtcattacttcacgatgaagtcattgcagattattttactctgcttatctgaccctctttttttctcttctctctctcttttaaacttgggtcttttcccctaaaactaattttattatgcattactcaatgcactctggattcacccttctaaaagtataaagtgcttcaacagatagccagttggaggttatctgagtctcaacctaccgggatgagcaaacactattatgggctattacatcttagtaatatgtattgtgcattatcacatacatttcgttttggaaaccacaaaagaaacttaaacaatattacacaatttcagatagtgaggaaagcagatttttgcatgttctcatcacaaagaaatgatacttgtctgagatgatggatagcctagataccttgctctgatgcctacagaatgtataaatgtgcagaagcccataagatgcatgatacctgccaattaaagacactgtggaaggggactggagccctggctcagcagataagaacacttggggtaattgcaaaggaccccagttcagtttgcaggacccacgtggtagctgacaaccagtgtacccaatgcatccttctggcctccacaggcactaactactctagtggtgcatacacatacatgcaggtaaagcactcacacataaaatggatattaataagtcttcaaaaataattttccaaaatattgtttaagaagcaacaagtgaaaatgaactggctttaagagacttctgtgcatttttggaagacatttaggtgtggcgaggtgaaaatatgcatactaggatttttggagggcctttataggctgtggtgtggtcacgtgtcaccccactggatggagagatggggaaagttggaatcagaaggctgaggtgctccatccaaggactcatgacttaaatagtgcagtggccatagttcctatccaggaacgtctgactgtacagttggttttcttcccactgcagatgtcactgttccttgagctgccttagatgggaaaacacagaaaccagggtcacaggtgcaaaacatatcagtggttcagtgtggagccaagagaaggctattactgcccactactttttctgagatttcaacttcctggaaggtgatttttataaagacccacgtttcttgattatatctaaatacaataagaaaagctgtcatggattactatcttttgaagcatttatataaagtttgaagtattttttgctgtaacaaatatagctgatagttggggcaactggaggaaggaagggtttgttctggcttacagttcagtggcccagttatagtagagatgtcttggccccaggagtttcatgtgactggtcccagtgctcctacagacagggagtagagtactatgaatgttcatgttaggccaactttctccattttatgaaccaggacccctgcctatagtagtgcagcctgtattcagggtgggtcttcccacttcagttaatatgttctagataattcctcacaggcatgttccaaagcctatctcctggttagtctagatcttgtcaaactgacagtcaatattaattatggcaattatctcacttatacaatggttatttttagcatgaaacgcaccccctccagccatttaattttctttaatttttacatgagcttcatgggcagggagaaaaaagatttgcaaaagaaggaaaaataaggttgatgatgcagctaataaatagcaggtatggcccatgcaaggcactgggagagtcaatgcccatcaccaacttgttaattaattaatcaaataaaaatgaagaagggtttatttttgacctgtgagatcctgtgtactaaaattttctaatctttagagggcataacaagctagtcatggacctgatattttagataattatttcttttcaaaaaaaactcttctatcatacttgctggtttgtgtacaaatattttattgtttaagagttttataaacatatgcattgtattttgatcaaacctaccctctttcccccctcggtgggtgatgctctttggatctctgcctcacttatgttcgttacataatttatatcctggcaatcctctatgactttatgtttgtagactcttgtttcccagggtacaatgctaatttgctaaaggtctgggtgggatcctattgtatctgaatcctacccacagcaccaagtgtatcactctggctaaccaagtgtcacatgttaggctggtgccatgatgattgatgaaatcactctgctgttgatgacacaccagaggttacacacaagtaaaagcttttcttgccaaggttgctacctggggagagcactcacacatttgacgctgttatcaataccaagaataacttttcagtgcctccctatttgaatatatgctttttaaatgttctaattttattttatgtgtgtggttatttggtctagctgtatgtccgtgcaccatttgaatgcctagtgcctatgcagggcagaagacagtttggatcctctcaaactagaattacacacagttgtgagccatcacactggtccttggaatcaaacctgggtcctctagaggagcagctaatgctcttaacctgggtcatctctccaggccctcaatatatgttctttacaataacaagccctgacctccaatgccaccagcatcactgccacaactattatctgtgtcacaataattctactttgtttatgtgatatcttatgatctaactcaagactctaaaaatcgtgtcttcccctttccaagtacagcactgtaccaactgatctttatacatgaaaagtaacttttcttccacatcattctatacagccctgttgtatacattagtgtaggacttacatagttattttgatgtctaatttcagttatgacaatcagaataactttggacactcataaaatttcagctatcattagtgcttcctgatattatcactatgatctgacaattcatagatgtcacacagacacataatatatacccatggataaactcttcgttaatatataccttgaagtgtccaaatccaaaagatgtttgaaagccttcgtggaacttacctttaacaaatacatcataatttgaagacttttatgttaaaaaattactataaattttgcaagtagccaaaagttgttataggtatgaagattcattttatggatcaacttgactgagctattagcatccagttatctagaaaaacatagtttcaggcatgtctgtgagggtgtttgtagccagactaacatttgaactggtaagaaggaggcagattcccttccctataaaagtgatgtatttgctacttttttcattgttgtgaaatagctgacagaaacaacttaagggagatgggttttaatttggttccatccactgtggcagtaggatcaactcagtccccgtggcaggaactggaggcagcagttcttggcttactgacagatcaggaagcagagccttgagctggaactttcaaaggctcaccctgagtgtcctccttcttaagcaagaactcgcctcttaatttctccacagcttccccaaaattatgccatggatttgagaccatgtaacttaaacacatgagcctacaggtgagcttctacattcaaacctgggggtcatccaatcagctggagatcttaataaaataaaataccgagtaagagataattgtttctgcttgactactaccaagccagaacaagatttttccttttctctatgtgaactgaagtagaggctctttctcagtactcagcctcttgaacttggactcaaggtatattattactctactaagttgggactcagggtagtgaatgtaaattaacctccgttgtcttttgggtccattccttttatagtcagcaactaaaaaattattgagtcttccaatcaactaataaatctcctggtgcctctgtttctctagagaacttatcaatatagaatgtaagctcaatgaatatattagtgggaagttggaaatgcaattattggccatatattccttgaaagcagtgaatgggatcataagatatcttgaaaactaatcttaaaaggacaattccaaatatgtcttaaatcaatggaaatatgtggtagaatatgatcaccagatcagtatcttcatcctcagggcatgaagttgactacctagtttcctggtgtgggagtgagcacgggtatattagacctctgctacatgtggcctgtaagagcatcccacacaaggttcctttggttcctctctgttcagtgctaactttagttatgtcctaaagaatgtgaagcaggaaactaaggaatctaagtcccttcaaaaacaaaaacctctattggactttacatgactgaaaaataacaaaacttctattttattaaactactgaaatttgaggagtgtgtttagtttataactagagctaggagctggtattacttaatcaccatacaaggtccctggaataagggtagaggtgagaacataagaacagtatacacataaaaccgtaacttctgatatgtttgattaatatgtccatttcataacattagtgttatataatagctgattatactcaaaatatttttgcttatttcttgtcatgttgaaaagtaatttgaagcaaccttctttaaatccaaataagaatttgactagaattcatacccttagtttgttttttatctccttcatgtgtcttgttaacactgagccaattaaatatcctattttttaaaatgaatgttaagagttagttataacatattctttggaggcatggatggaaggaaaaaagaagtaaaacaccaaacactttttgcctcgggtcagatctgaattctaactcagagttagaatttactggtgggttggactctctaagtctgtctcctcatctgttaaccagattttaacattctccactttgttgtttagaagacccattcagatcatgcctatttaaggggttctgactaataaaatgaatagtttctctctcatattttctcacacacaactattccacttctgagcgaggctcccaaaggcttccaagaatctgtatgtcttaactcagaagaactcacatagaagcctgtggattcaaacagctgatctggttttcaagacatactatagggatatatacctttcaagacataaccatagactcaagaatcctggaagcatgaaaaaccagaccaaaataccaagatcaatgagtaacaaactacaatgtttttaggatggttgactcttccttatcttactttgcccaagcctcgactttggagcacattttgtgactcagattaactaaatgacttaattgggaagccgttctatgaagtatagagtggagaaagatgtcaaaaattcagtggaaaaaatgatgtgagataaaactcattttcgtgaccttcagatttctgtgagtacatcctgtgcccttatcagaaaagaaaagtgatggaaggtggctaaagaattaggttttgtatcagaaaaggatgagctagactccaagttcaaacacctcttgtctatgttctctacagtcagttaatggcagtgtctatttcctcattaagagaaagggtgcttttcatgcccaaggatcatcgagctacaaatgtgctgattcagggaaaggagtgtatgcagcactgggcacacagggaggtatctggcttgaaagagaatgtctcccataggcccgtgtatttgaatgcttactccccagatggtggtgctgtttgggaaggttatggagcctttaggatacagagcctttgtataggacgtgtgtcattgggggtgggctttgagagtttacatcttccccttacttcctgttctttcctgttgttggagatggatttctatccctgacacctgctgccatgactccatcatcatcattacagtctctcctgtggcaactgcacaccaaaacaaactcttccttctataaccgccttggttgtggtagtttattacaacagaaagaaactgatccatgagggacagtgtgtatcgttctagttattgtggactcctctgatctgaacgactggcccactggtgaacattatccaggttaacctgactctgaagatgcctgcactgagttttcctcctcctctttgggcttggacacagaaagcactttgtgcttgatcacagtctccctctgtgaatcaggacggaagaggggagtgggaagacaaacatatttccttgagcttagaaagtaaggagcaatgtaacctggacagtggtgttatgggcaatgatggccaatgtttaattctatattctgtaggtcataaactggccatccatcaagccaagctgcaatagccataaaggcacatgggagaaagcccttggctcctagcaaaaagagcaggatctccccttaagtggagacacagcactgtctcatcccctaagagttgacccagttgaaccaaccaatcactctgccaatggatcaccccttagtgcacttaccctaagcctggctaaagcaattgaaatataatcatccctttaatgaaacaatgtacttttccttcccagaattccagtttcctagtgcaattgctccctatctgttatgaggtcatttgggtctaccagccttgctgagtctggcattctgttctcttctatattctggtcagagtttaagtatgttctctctggtgtgttgggcttctttccttcctcctctctctaaatctctcttccttacagtgggatgtgcatatctaccacatgggtaacctccatgcaggcttagctcaatcagtttcttacctctctttctccaagctgagatttacagcttgtccaccctgaaatttttcttttgaaatttaataaaatagttgccaagcttctgcttgagttcattactaaattatttggggactccaatttccccagcatcactagcttagattaggagtctggaattttccaagtttatcaggatatcaagcgttgcccccatccccacaagaatcccctcttttggtatcatttaaatatgagtttgcttttcctatggtaggataaatccccttaaagacaaggaccacatctcttttacatctatcagtcttcattcagaacctagcatggtgttttggatctagattcctaagatacaatttaaataagataaaaagcttaagtaaatttaattttactcacagttaaagggatgcattattgctataccagcagggtttagacatcaataatatgagcttgaatatacacacagttggcatttcctgggggcttatttgtaactatgaattccatgtaaccttttcctaagcttcatctcaccctcaattaaaaatggaactgattaaataggtaaaatatatttaatgctactacttttgattgctaaataaaaacaaacatatccatcaatgatactttgaaccctatatattaaaatagcacatacttatgtattataaagctatttagtatgtacatattacatcctttattatgtgaaccagagaaaccttttagaaagtttcagggaaattatcaacttgtttagactaagatatttctttctgagtctggtcatgatatctgtgttagtcacagcatggagagagtaggggtgggaacagcaatatatttccttgaactttaatgaaattaatttattcatatctcttccagagaacttactaagccactacaaaaggaagaaaggctagatacgataagagaggagagatggagccgtgaagttggagcactggacactgggaaagatgcccaccagagctgagtgccattgactgttaaggagctaagacatactgcaggtgccatgggggtgggggcactggacctctgagcagagcgggatggatgagggctgtcaaaggcacaaaaagtgtgggggtatacttaaagccagaggaggtggacagcatggatgaatttcatgctgagatttttgtcaagagtgccaagtgttcctctgatccggtagtgatgtgggcagactgggggtagaggcacactcaagcaagtcttagaccagagatgcacaatggacactggctctacagtggcaccctgtgagcttagctagtgtgtgcacattccagagtatgaggttgatgtgaattatcaggctggatcaggcaccaatagtatctggcttttctatttccctgtatagagtagactcttgataaatgttatctccaagaatgaattttgttagcatcctgtgatttttcatagttaatattcttaaaatctccatgtttcaattaatggcaacttattataatttgaaattcactaaaggaatagattttaaatatctggaaatgtaaattagtttgattatgctaatacttttgaaatgcaaatgtatatttacatcacatatcatgtacccagaatgcacagtttctttcattttacttcaataaagttgaaaagcattacaaataaatgcaattttgtttttttaaagattttatttattcattatgtatataccattctgcttccatgtatatctgcacaccagaagagggcaccagatctcattacggatggttgtgagctaccatgtagttgctgggaattgaactcaggacctctggaagagcagtcggtgctcttaacctctgagccatctctccagcccccaattttggttttttacaactatcactgtgtccaatgatacatttttaacatcagcctaacatattgcccactgaagcagagatctgactcaggagacctggaaagaggtctccatgtcctcggtgctaacaaatcttgtagataatagagacaagtgactcattgggaactctagaaaatgctcttatcagaggaacatgaagaaaatagttactatattttttgagtgctgtttggagggagggctggctctctgaagtttgatatttataacataagcagacattagtatgaaggagaaatataatatacatcttgaatatcatctgaagtcttaaattaagactaaagctaagtatcattttcatccataaaagttcgataggattaccataagcacaactttgtgaagacagttgagatttagtatagaataaatgaggaaaaaagcttaaaggcaacaccagcaagagtcagattgttttccttcttttttttttcttttgagtcaaggtttcatataatcctgtctgcaaagctcgatggatagctgatgatgacctggacctctggatcttcctgtgggattaatagtcacgtgacagtgctcccagtttatgcagtgccagtgacagcaccaatgctctgtgtgatggggagacacgctgccaacatccaatgcccaagagtcagaaagcttgacaaggcagaattctgtgtgatattcagaccttctgtctgatttgccatcatatagtcagcaaaaagaatactcaagtcaaacttcacctagaaaatttgactttctatttctaagaggaaaaaagaaaggccaataagaacactcatcttagctctcataaaataatccctaaggctttttacacatcaaatagctcttacagaatcaaattttgatgaggtaagtgtaaagaatttagtaacatatggattaaatttccctcaaaatagacattattttaaaattaaagaggagaaattcttaagtaaaatatgctttgggtttttcttgaactccaaacacaatttaaaatatagttcaagatgttcaccaaataaccagtacagctgggttcacccaaacgtggttccaagataggaaccatagggaattctggtgattacaaatatggcaaaattatttgcagatattggcaaaatgtcagtgataaatgcagaaagagccaaattttaaatataaacagattaaaagttacactttctatctttaaaaactaagggataatcacatcccttaatagctggtgaaataatttatagtcatatttttcacaagaaagcatttatttgttaatgtggataaatatttcaagaaaaattccaatagtaaaagaagcctaatctaggaataaaattgcaacaatctatatgttctcatcagaacaaagctttaaagattcaatactatcacgccttggggcacatgctttttttttaattttgatcttaactatttgatcaatcaatgaagccaatacaacaaaactacagttattgtgtttatcatgaaagggtgctaagtattgttaagtgttttggtttttctctgaattatttgaaatgatcaagtgttttattttcccattcactctattatgaggtgtagtacagtgatcaaatgtttatctgtcagtccatccttgcatttcaggtgggatgtaaccatcttaatatctactgacttcagatgcttatgtttaaggagttttgtatcactgttcacaatgcctatggctgatacttttctcttcctgtgctatctttctgactgtggctccaggataattctaaactcactgaataatttgtcttctccttgctaccggctcttctacaaagagacagagttttgttcagttcagatatggtcaaagccttttctctataaacagattgctgatcactaaccataatagttaaaaccagaagcaacccaagtacctattggcagacaaatggatagaccaatatgctatacttttaaccatacttaaaaagaagcaacactgatgagcctggaggtcatggtgagcctggaggtcatggtgagcctgaaagtcatggcactagaggacataagccagcctcaagcagagttttcaaaatcatagagacagggaacagaatgcaggttgccagtgactggagggagaagtgagaagctgttgtttattaattatcatgtttcagttttagatgatgaacaacagtgttggaggctgaatgcatagcttgatggatgtatttttgatgttaccgggggttgaactcttgatgaatcaattgagtgttttacacttaaaaccattgagatgcattatacatgaacttctatgatgtgtagcaggacctaagtatactgtaccatgataaaactcctgatggcaactgctcttagggagggaaatagatgagagattcggggtctgcaggtcacatctgcccatttaatctggacaccgctgtcatgaagtagttgtcatctcagagaacagctgtttgggaacagaagttccagcttttgaatctacatcgacctccttcaaatgagtttgtttgtgaagatctgcttctggcaacttttaaaatacatgccaacacttatgtaaagtttaccataataaaagtagaacataaatgcaaaagccattgtcttaagtgatttttctcaggacaagagacaacttaagagagtatgggtttcagtttaactggtgggttgagggcagagtcgatcgtggacaaaagtcatagtagtcagaacttgagacttgctcacactgcctcccccatcaagaagcagagaataaggcatgtccctgctccctacacctcctcctttttgtctagtgcaggaccccagcctgtgaaatggtatcgcatatagggaagagaggtctttccacctcagtgaacttaatctagataatcttcccacaaaggaagaacacaaaatcccaaatggcaatgtctccatccttaagcccagggcacagtgcacatctctgagtgatgttagccattcttggcaatatccctagtaacagagactctttatcaaaatacactgtagcaagaacactgaacttgccaacaataccataatccttatacagataataagacaactaaagggagagaaaacttagattatacaccacacaacataggaggtgggttgggagggtgcacgaatatgctacagtaagttattataagtcttcatgaggtcatactacatatttacagccatttcttcccctgactcctcatctcatatgagaagttcatgttttgtccctcatattcttggctaatttgccttttccttctagaggtttcaagccacgctagtccttcttctctcagttgcagctatttttttcattaatttcactattggttgtggaaataggaaacagtggttatccaggaatagcccttcatgtttcctctgtggagcaggaacctgattttcccttggtcacaggatgagccacacacacaaaccataagtttccttttttttttttaaacctgttgacttagtaccatgaagaagggggacataaccacaaaaataccaagtacattacaatgcgagccaggtttgatcgacatgttctaggagctggttcttgggtcacttctgggacttcactatgaactaaaggacccgtttaaaccagaaagcagtactgtgagtgaagaggcagagaggaatcactctctgtagccaggttctgtaccccagaccaaagcagcagccctgaaaacacaggcaacagtggggccttagaaacaaaccatcagcacctttcaggcgggactttcggtcccatggtctcagagatctagagagcagaggcaagagggaggtgattgcatctgctcagcacacccagctcatcacttgtgaaacatggagacttggccaacatctgtaaggcctgtaaagggcctttccccaacttccatgcttcattcctctttagagcctccctatgtctctagactcctgtcagtccatcctggacagctttacctcactgactgggaaaacacatatacttgccatgtaaacatggcacaaaagtcctgcccatgactccagggctggggcagctgataaacttgtccactgtccacactgattttaaaagtttgtaggagtttcagacaacctgtctgacgaatataccttgctgtatagagaagcacactgtttgttatcgaagagcgaaattggcccattggagccaataaaacgggcagctgaatgaaatgtaaaactcacctggtgtttctggggtcgggaagagttggaatcaaactgatgggctgtgtcgttccttccttgaggtccatggtcgcacctttcacaaatcttctacaagtaagcacacaaggaaagctgagtgccctctgaggacctaccatcatcttcacacagaccacaaggctcgggggcctgggcatggtctgtttgcctcctcgtcttgtctgtgttctgtcctggttgttcagaattctgttgtttctagtctgctatgtatgccagtgtgttctcaaattaaacattaaatgattaaactcagacacaagaaacagacaggaagacccaaagttatcttgtgtttcaggtaccatgcagcagccttcctcagagtagtgttaagtactgccttttcatttgatcctgggtgttaaaatgggaaagttcgccatgaatctggttccctggtgtgaaatgcaaggctctggtatttgaagatgtttgtgaaatcccacaccatgtttcattcattaattctgatagctattcacaattagttagcgatgcaatccaagtcttagcttgactgttcaatgtataaatgcaatgtctactatgggaactggccgattgaccttcctggaaccgggacagctttgggggaaaggtcacaatctgcacattccagaagctgcaggggcagagggatgaaagccagttcccttctggaactgagaaatggagtcccaaaggagctaggtggaggaaggccttgtgaagaggacagactaaaagggaagtgggtgcaggggccctggtaggaactggaagacaatggcactgctttctggagggatctgcattacctcttaccaaataagcacctctggggagaaatgaggacaaaaggaactgaggcaaatgggcaagagttacctaaacaccccatccccaccgacccaccgccccacccccatccccccatccccatcccacccacctcctattcccatccccacccattcccatccatccccattcccaccacctgagccccagcgagtggtactgttgggaggggtagcagcttatctgatgcatgcagtatacagtgatattctcaattcaccactagctgacttctcagccttgattagggctctctcatggacaaacaaaatgcacatcaatgtaccccacagaggtggcattagctcaacaacatatagagaaaaaaaaaaaaaaccttaaagagcctggaatgacttaggagtgagggtagaagcaatagtaagaaaaagtacagtagacctagatgtgccggggcatgcctaatcttagaacttggggagctgatgtaggaggattattgtgagctccagaccaccccctaggctgcagagagaccatatcccaagaagaagacgtaggggacagaaaagaaggaaggaaggaaggaaggaaggaaggaaggaaggaaggaaggaagggaggaaggaagggaggaaataaaaaggccaggcctgctagtttactcatttaaatttcacagtttgtcctgcatagagagctccagaccagccaggactgtctagtaagaacctttctcagtgataatataataataataataataatcagaagaaggaagaaggaggaggaggaggaggaggagaaggaataaagagagagagaaagaaagagagagggagaaagaaaggagagaaaggaagagaagggagaagaaaaaggggaaggatagggaggcagacagagagaagagagatgaggagaaaaacaaggaagagagaatggaggagaggttgaggaagagggagaacggggtaggaggtgcggggaggaaggaccaagagcagagcagattcttgaagttgttttaaactttccagtgtgacaatatttatatgggacagagtggtacacacgcactcaggcactcacactcacactctggctagtgtgcctatgctcgcctcactgttaaacccaaacatgttctcttgatatccatctgctttggatatgctgggagactgcccacatttcttccctcttctcttccccagaacccacatttgttctctgccctgcaagagaacagaacacagtgggttggccattcctgggagggaaatgccctgttaggaaagcaccctcagggttgtaatctcttatccttaatctggaggctgagcttcattctctgggatggagaaacattgttatggtttctcccctgcacctggcatgtggttctctagtagaacagcctaccacaagcttaccacaaaacccctacaatttcattatttcaggctgagaaagcctgccttattttaacagttgtacctctgctcatatagaaagaacaaaagactgtgatgcaagacctggtcatccttgactctctcccctccctcgtcctgcatttattaaaaccagcagctaaaattcaatagcatttagaaaaccatgaagccatctcctggagttctttggcatgttttatgttatagagttaagattataaaagaaaagaggctataatgtgcctctggttcaaaaagatagtttcttgacattggctggtaacactggcagctaaaattgaagatgagtcctcagagacagggagagagagagagcatgtgtatgcgtgtgtgtaagtatatgtgtatgtgtatatgtgtgaatgcatatgtgtgtgtgtttatgtgtgtgagtgtacatgtacaggtgtgttttcatatgtgtatgcttctgtgtacatgtgatatgttgcatgcatgagagtgtatatgcatatatgtatgtttgtgtgttagaagtaagtcaaagaattgcaaagcaaaagaatcaaaatgtcttttaatggtcatggtgacatcagcgccttagctgatactttattgagctacctgaatgtacacatagtaaccaccctaaaaatgggagttgcctcagtagaagcactcagagcacagctccctgacttattgaagattggatgtttttaagttgacatgtcattcatggacttcataagcacacccaggagattcatccccaagccttgttaaccatgactggactcacaggctgtttcctatgggaaatacaaaaatttttgttttcaatgaaacatatgggccaaattagaaagtaaataaacgaatacttctcaagaatccacgataacacttgccgagcagcaggtcaggcccgacttaatctagaaatctctctgctatgtgtaaagggttatgtcatagcattcgtctttaattacttgcctcttctcaaaggcctgactcataatgtgtttctcggttaaccacaaacacttgcactacaagatttctcttatagatccgccaaaccccccttcacccttttccctttttttgttctttcttacattgtcagaactcctggaaatgaaatacggagacactgcctgaactactccagctctgacttcctgaatatttccatgcaaagaaaaatggcagcatgttctcttgactcatgcaaagcattggagccagcttaactgtcatgaaaatagtactgtattgtcacagttttgaacttatatggctgtgttcctttgagagtccctgagcgttcaggaccatatgcaaagaataaagacagtggggtatagctgacaaatgaggacaagtcaattaagcagtcgtgtgcggattttcttccttcattgcgtctcctctccctcacctacccctgtgagaaagaatgtgttctggctttactctggatggatgagatcagccacctcctcagcacatgctgttaatccaccctgtctcagcagaagtgctggttcccagtgggggtagctgccatctcctcagaataatccagtgtgaacttggaggctgtaaactgcagaatgtgtgggaagtgatgcaatgttaatggcacgtgcattgggattcgtttagtttataggtataggaagacgcgattacatgacgccgtgtgtgtgtgtgtgtgtgtgtgtgtgtgtgtgtgtaggccagaggtcagctgtgggtgtcattcctcaggagctgtccatcttatctttcaggaaagggtctttgactgggacctgggacttgccagtcaagccagattagctagtgaaccccagggattaaccaccacctctccagaattggcatcccaagcacatactaacacactcagtattttatgtggatgctgggactcaaacttgggatacaagtcctttattggctgaactatatctcctttgcccctgcttcagggtttcagatgtccccctatgcctggatctaatgcctcttatctgaaattctcacttgctgctttaccatggcttctctgttcatttgtttttgttgctgagatgttaaaaggaaggttaaagacagaaaacatgacctattcagaagatagagaataaaatgaacatttcccttccaatgtcgatattggcagttagtgacatacatacacagtttcccttctgggaaagaggtggaggtgtcttccaattctgtatcatatatgtcaggctatggtctataacccttcctgtgactcttggttcaagtaggtaccctgaggctccttgttaacacaaaactctttctgcctgttagactgagagtaggttcacctcttaggcattttcctgttccttaggcacattgccagtgagaaataacaggaagaagaaggctgttttaaaggatgcaaagacaaagggagtccttggagccctgcagtcttgcatttggtgtctgggtctctcagggtatctcctgggctccacactgctttatatccacttgatgggcagaaaaaagaaaaataggaaatccatacagtataatcaccatgagaaccaagatcaaaagcaagcacaggagactagagagatggctcagcatttaagagcgttgactgctctggggagcacctgagtttgcttgaaaccatccatagcttcagttctaggggacctgatgcccctttcttgtccttgaaggcacggaactcacatgctatgcttacacacatgtaggagaaacattcacactcataaaataaaaagtagtctgctttcagaagcagaggagaccagaagtctgacaggaagacactttagaatgggctctccacagcccagcaccttctgggacaagctgcccacatgctggccctgctgtaccgtgtggcccgcgttatagtcctctccagacaggggtaggttgtattctgttggaatgttcagaaagggcttagagagtggaatttaactcacactgtggttaatttattccattgtcctgagcagtcagctgtgaagtgaaccgagaacaagggccaggcatggcaaggtggggaaaggtatgtgaatatgaggccctgagaaagtaaaacatgaatggggagaatctcagaccatgacgaagcaacaaggtatgcttggagggggggtgtgttctgaaaacatatttcttctgatgaccagtttcacaggatttggtggggaaaatgggtttggggctccagacagacactagtctgttgttgatgacctataccctttcccaagggcaagggcattgagttttaatgactttagaactagcatctttatcagatgttttctgctgtctgtaccttctgccagttgactgataacttgaagaatcctgcttatgtactactgcttttctccatggggttttcttccagtatcctaccccagactacctgggatttttttctgtaggtttctgtcatcaacagagtaaaaaggcttcttactcataaaatactacctcaaaatacaactctagcctcaaaggacacaagagattttattctgaggctgatatgagagactagggcctgcggacatggatttaggttgccttaaaaaatatattctagtacataagcgaatacaccaatgtctatagtcacagaacaacaagaacaagtcatgatcaagacattttttcaaacacattggtgtgactatcgggtaggtgggtcacaagagaataggaaaccctccctccaccagaggcttcaagtcttacctggtgacactcgtaatttacagactggcccaattcaatggtctgttaaattaggggtttcacttacttgaagggatttgaggtcagacacagagacagtcaatgagtggctgttgagggaactgaagatataccaggataactgggctctggatctccataccaattccccacaatcaccaagttctcatgagcccatccccctgtagcatctctagcctttgtccagctgttcttctggagctttaacttatacaacaaatgcagacagtggaccccgatatctatgagagcaacacttctccattctacaactcagccagctttcttgtagtcactttttgcctgcagaagcatttccctaagcctccccacctctgactccataaatctttagggaaagattttctttctaggtaactgccttattcatgtagatctaggtccactaaatctctcacttcttgatctttgatagaattattttctcttcatgcctacccctgactctacccctttgactgcatggcatgataaaaaaaaagtcattttctcttcataatcactgcctgtattttttttcctcctacttggtaaagttatcgttagagcacagctgattactgaaacattctttacacttagtaaggaaataaattatgatgtaatgtacacaccctccctgatagaaccacccttagtttggaacacaattcctgtggaaaccagccacattaagaaatttccatttctcctgcccacactaatattagatagttagttggaaattaacaagcctgaaggtcatcaaggatggtctccgccctcataatcaaggtcagccctagtaatgtacttgggtgaaggatgtctcactgacctcttctttagctcttaaatgctgtatgacagggaggacagtggtggctgcagggctttataaaaagttatttccttttggtaaagcttgataaaatagatttattttactttatggactttattttttaaactggttttatataatttcttcttttttgctccaaagaatatgatctgagttatatctatggctcagggtggaaacattggtttccagtaaataaggaagccacaccattgcctcctcagttaagaattaataaaaaaaaatagttgggcaagagagatagttcagtggttaagatcacaagatgctcttgcagaggacccaggtttggttcccatatctcatgtggaggctcacaatttgtaactctagctccaggagatccagtgccaccttctggcctctgtgggaaccaagcaaacatatagtacacatgcgtgtaaaacagttgtacacataaaaacatctttaaaaaagagagttaattaagtgggttttagaaaacagtaactatactacatgaacatgtaggttgacttggtggtctttttggccattgcacctcttattcaatgacagcaagtcctctgcaatggtctctgagtcaatgttcatttcatgagcgtttctctccacaatggtctctttggctatggccacttctcatcccacactctttcctgtctcctatattaacttactttcatgtgtcatctgaatccattccctggagatcctggctagaggggaagctaccatgagatactggttgctaacactaatgttgtttgccagaatcaaaggtattctgctgttctttcttctttctatattccctagtttgactatatggaactggctaaaactacaaaacacattatgtctaatgctttcattcattaataagtatcattttattctctttatttatactttatttttatgactacatatatctgatttcttacaacttgtgagttttcactaaatcgtcttaaatctttggatcaagtagagttatttaataaaattattaatgtaaacattatttattaattttccttttgtttcttttttccatccatggtccaacctttactttataggttccttcacttaaaaatcactatgacccatgaccatggaaagtttagctctgcttagttactgaaaacaagatgcatcctgctctaagttactccatttttaaaaaagtaaaactctggtgtttcagatggtgtgtcttgtcccaaagactccattttaccagcagtttttttattcttttgatggagaatcaatatatgcctgaatgaacatatcaaccattagtctagcccgatctgtgcatcacagactagtaaataatttttcctatagaaaaagtgtcattgtatacctttataagggtgaatcatgattgtaagagcacaaagacatattaaaattatatcagggaaaccaggcccaagaatttaggcatacactaatttaaggacagagtataagtcccttacctggactccataaagtggcggacacctcactgatgtgggatgtccttctgtatatatgtttctcttattggttgatgaataaaacactgattgaccagtagccaggcagaaagataggcagggctaccagaccaggagaaggctggggagaggatgcagagagaagctgcaaagagatgccatgtagagaccagaaagataggatgtgccaggcattctctggtaagataaggccatgtagaaatacataaattggtagtaatggtttagtaattaagacagagctaggcaataagaagcactagccaccagccaacagttttatagttaatataatgtcatgtgtttatttggggcaaagcagctatgggaccatgtgagataagaacctccaccaacacctagtgctgcaatggtaatggttccagcaacctgccatatgggcatctagtatactccagaaggaccagcaagcagtgagctacagactacccagggacatcatctcgattcagtcctcactgttgatagatacagtcaactgaacttttcacctcctattcaccatctggacttcatctaccatcttcatcttcatctacacttggtcttgtccttttgactctgcttctgggcccaaccctgcagcttcactgtcatacctgtgacctccagtagcctgattcagacacatcagctgctccagcatcatccttgccgttcaagctagttctcctcgtcttacctgcatccctcacatagttcccatctgtggcttctcagatctctttgaactaccttccctctttaactcattgtagacaccctgtcacttacatagacacagctatgttcacgatgctgtgtcatgtgtgatctaagaattaagagtaacaactaagattggaataaaataacttgtgttcatgttagccagtgactagctgggaaatagctgccgttgacatgtcttcctcttgtgaatctattattattcaataatactgacactgtggtaagacaaaaatgtgttcatctatatttcagatacagagcactcctgaaattccttataatgagggcatatgacaaataaaaagtaagtaactgaaaggtcctagtatggtagtggtatactttgtattctcacagcatgacccttggtttatgaattacagcattgtcactacaacaaccttgctttttctaagcagttagcaatgacagtgcatatcacagaggacatacaatatttgtgtgaatttccttttaattcactgttccccctgagtcccaaatgtgatgtcaatattcccaatccagtaggtttataaaatatattagaccagccatgattccctttcttcttcactagatacagcattcctaaagtcagctctccactgtcttttcagtgtacatttcccctaggatatgatttgggtttctttggaatgttgcatgattgttcgttgtccaactaggatgctactcatgtgtataggcttccttttgtgctatcaacctgctctcaaataatgacatggagatttagttttgaatgctcagccttagcttagcctttattttaatttgcttctccttatctatgttttgccttggggatttttagccttttttgccttctatatatcttattttcactgcttctcatgtctggctggctggtggctgcctagtttctgacccctgacatgtccctctttttctccctcatttttccttctctctctctctctctctctctctctctctctctctctctctctctctccctctctctctttctttgcatagatttctctcctatttattctttctatcagccccacctatttctctcctacctagctaatggccattcaactttttattagctgaatcaattaggtgccttaggcaaggtgaaacagcaacacatctttacataattaaacaaatgtggcataaacaaatgtagtagatccttacacattaacaaaagcagcagaaacaaatgtagcaaacctttacacagttaaagtaatattccacagcagaaacatatgtaacacatctttaggtagtgaaaacaatattccacaacactcgtgtttctccgaacaactctggtaatacctgacctggaagggaagaaaggatctgtgtcactgggaaatttgatgtccaattttttctctgtgtgtcagctatgacaacatataataagaatctgagcttcagaggttttgattgctgcaggaaactatacaatttgtgacagtcaaagtcagtcaattgtcttcagcaagcattccagaaacctccttatccccatcctgtctgatttattaccatatgctttgaccttcttcctttcttcataaaaagcatttagacactatttatatagcagaggtcagcagataaatgccaaaatttactgtagggccccatttgggaatattcttatagtggaagcacatggattttgatatccttcagtcatgtaaggaaaaaaaaataaagggaccatgtcctaagagaaaaaaattaaactttccatagatagaacatagttgcattttaagtgaccactttaaagacactactgctgttttggcaaagtctagtaagccacacaaaattaatttcatatttcattggcattactctcaggaatttcatgttgacataacctctagaggggggtgaagtgatgtagacaatatgcttaatgttcccataccaacaaaatatttcaagtcagaacagagatcttgttctatagaataattttgttctatagtacaaatatgaaacaatcatttccacattaattatgtaagtgctagatgcttctagatcaaatgtttaaatcaaattataggttttttgcatggatccctgatgtgtgaactcacaaaagaataaaaacccaatttattaagagatgcaatttaaaagacaaactcacagatacagagcaatgctgaagccattgctgataccagtagactctccattccctttagtctccaaccatgcccaaaccacaccagagcaagagtgagcatcctttcttctcaggcatatcaattcctcatgtagcacccaggtcacaccctaaggctgaaaccccaaaactataggtgtaatgaattcctacaacaggtccctgtggttccctcttctcagatacatctaggtttttggcaagttgacaaatgtcagccaacacagggagtatgtccacagtgggggctgagctcagttttcatcacaacaatgaatgacttggtgcaactaacacaaaaccttgactcaaatttcaaaagttgctgttcataaatagccccaagttctaggtaggtggcagcctctgatggcaggagtgtggagtggagcccaatcatccaccttgctgccaggtagcaaagaagaaagcaaaagtgaccaagagccaacaatcctcttcaagggcaaatgcccaatgacctaaagacctcccatttaactcctacttcctaaggattccatctctttcctacagtgttgtcctgagaactatgcctttaatacatgggactttagggaacatttggcaacatccaacctgtaccaatcagtgatgctcatgcagaaaagggatgtatttcttgggactatatcggttaggaatagaaaaagctaaagaattggtttattcttttgcaactaaatgttactcaatgctgaggcacaaaacctttaaacagattccttaaaagaaaaaaattcagagaatcaatgagtgagctagttttctgccaataaataagtaaataaatagatcaattattatttttaaaagtgaaggatcactacctaccagaagatcccattcctagacctttggggctaagatcaagatccaatacttgtgcttgggggactgaggtgcaaactttttggctgaccacaagcttctactggatttgttcttgctggccagaagtttctacctgagtttctggtgtagcagtcttcattgtgtatcttcaaaacagcaagtcgggttgcatactgctcttcatgctgctgcttcttctgtcatctcattttctgaccagttctccttaacttcctctgttgctttccaggtttaacagagaaagattcccagtcagcatcatcctgatttctccatattctgtggctgaagtgtttagcatcttcggcaacaggctcttaccattgagttctgtgatatgcagtgcaatttgcagctacaaaaagaatgaggctctaacacatgtaggcatggatataactggaactaacaatattacacaagttaagccaatctcaggaaatcatacataattttactctcatatatgttttaatttatactcaaagtatctgcttacaaacagcaacatggaaggtaggggaaggtgaaaaagaaaacaatttgcaatgtattttgtagcaaacctatcaaaatctcatcactcttctcccagatccatccctttatccagcacttctattccacggcatctccttccatccaatatcacctctcaagatattttccatattcagaaagttttaaggaaatgaaacctggctttgttgaccaatctatatcttcccataaacagagaactgagtgatagaactttggaatgatgaaccgttcatgtgtatcagtataaacgaatccagcataatggtttctttgtaacagttttcctcatgatggttttattgtaacagctgtagtgatgtattatttatgatttactaaagcttgcccgaggattcagaaagcaaagccagtcacaagccatagaaatcaggcacacacctttaagctcagcagccagaagctaggatgtggtggtacacaccgttaatcctaggactcaggattaagaggtagacagatctctctgaatccaagactcaccatcaatgcacaagattgaatcagtctagaagaacagcagatcccaggcctttaatcccagcactagagggtataaaagacagaagcagggtcttcggcactcagtaggtggcattgattctccagccacactgaagacaagaaggctcagtgtcaaggaggaaaggaagacattcagtctcaggattctccagccacactgaggagaggcagcaggatcagccctgtcagcctgaagtagtggtaaaaactagtggcctgctgctttccttttctgaccttcagtttgaagtcttttatttattcatgctacaaacagttttttctcatgatggcttcattgtaacagtttttctcaagatgctttttcattgtaacagttgttcttcatttctgctttcaacctctctgtccatatctgtgtgtgtttacctcaaatgccttcagtctattctaatgatattacacccttccggtcacaccaactagttcaactatataattcccagagtattaactgctgaattaattactaaggtaattatgaaagggaaagagccaggacaaactaagatcacctagttctcatctcagaactcagcattttatcattttagtatagataattttaaatgcatagctgtatctttacatacataaacttttgcatacatttacctgatgaaacaaatataaattatagaaaatccaatatatagcatttaaccagaaatagtaactatagtttcagaaccaaaactaatctttggtagcaagttataaaaaacaattaattttcattatgttttgaactcaacatattatagcccaggcttgcctggaacttactatatatggcctgggctagcctaaaacctgaagtaattcccctttctttacttccccaagagaaaaaaaaaggcctgagctaagacaatcacttttgtaaaagcataataagtaatctatataataaatatttgtagcaaatgtgcaaaccaactgactggaagtaactggactgaatcagatcaaaccacatcccaagtgtgtgtcaatagctatgtgtgaaaacacagagttatgtctgacctcatgtgcagatcagagaacttgcaaaataggttcataccatgtgtagttttgctactaacagtaaccttaattagattcatagtaaattcaacacacttggtcagctatcctaataggatactgtttcttgttttataagatgaggagagaaatgggaaacactggttgtccaaagaatgcaaaacacagagctactaagattgagttccaggtcctcttctgccacaggatctctatgtgacataggaaaagtcttgatttctcttagtctccattcttccaagtgtgctttagagttgtgcataccttctttctctatctcacaggattaaatggagaagcaagagcaaaaataggaaaacaaaacaaaaacaaatgtgttgctcttctataacctaccaagaattaaagccaggggctagaaagatggttcagcagttaagagtactgtctgttcttccataagacccaggttcaagtcccagcacccagatggagacttgcacccatatgtgaatactgtcccaggggatttggctccctcttctggccttcactggcactgcacacacatggtacatggacatatatgcacagatatatatgcaggcagaacacccacatacataaaaataaatgaaaacattttaaaggaattaaatttctttctacaactttctagaaaaaataaactttctgcatctaccatttacatgaccaacagctaattgtcgtttttctctctctttagtcaacagttaatgccacctatagttaaccaagttaataaacaaatattactcctttcggtttggcacagggagctatgtgtatcacgtccttgttcttctgcagaggtctgggtccctgtttagacaaccttggtgcagagaattctcctggaaaacagtgtttgatgatttggagcaaaacagacatatggatcaaatttcccccccccaatatatcaagattgaaaaattaactggaaggaaagcacatggctttgctcaagtatgtaaaagctagcttggaaagcttgacaatcccccaagtcccactacattgttgtggcatgtattggcacgtgtgtgactcttgctattaaccagtttctccattcccaatgaagaatttatggctataccattactttcttcaggaccctaagattttcaggaatatacacacataaaatctagcctattataaacattatatgggtgggtgagaaatatatatatgatacataaatatttatcttataagaaattgatgtaatcatcaaatggtgtttggcttacaacaatttgatcagagtattctgtagctaatggctgtagttctgcacaccagcaaagtgatggtggatagagttcagctcagctaagccttattagctctgttttattgaaaagtcacagaaggtcaatttagtaggccaggtacctgcatctctctgatttaatggaaaactcaaaccatgttaagctagctccatctcccccctgttactacacaagagtcaacagaagtttgtttaattattcgtccccagttggagtcaggaacagacccaatcaattaggagggcggggtagcagtgggtagtgttgagattatatccatgtccactccatttcctccttcttgttcttcccactcaactatttaatttcttccttctacctaaattctgaacagattctttcttgttattaaacaatttaagctactggtcacttaaaaatatccatagttttgaaaaactataaacataggcccccatttagacccagggtaactttgggaaccaaggttgtgtaaactaatatgaacacataaagaagaagaatgcctattagagcatcatcagtgaagctgggatgaaaacagctctctctgccttcgctgtgatttataaaagtaataagcttgtgatttcatgatgggaggtagatgagtccctcactttctgcctgttaaagcagtcatgtctgtgtgactgtacacaggtatatatgcacaaatatgcatgtacatatggaggcgtgtgtgtgtgtgtgtgtgtgtgtgtgtgtgtgtgtgtgtgtgtgtgtgtgtgtgtcttggctgttgttccttgggaattctagataccttcacttttgtttgttgatttggtttgttggttggttggttggttggttggttggctggctgattggttgttttaagacaaggtctcactacatagcctgcctagtctgaaactcacagcattctgcctgtctctgccacctaagtgtttagattaaaggcatgtgccatcatgccaagccatctaggtttttgagacactatttttttctgttactgccctggaacgttcctggccaaggctggccaagggatcctcatgtctctgcctccccagtgctaggattacaagaacatgccactgtgcctggctttgtgctgagcagtgagctcaggtcctcatgtctacaaaaaagctgcaacagactttgtaacttgctgggtgccatccactcatgtcccatgggcatgtggccatttaatctaccactctaaactaaataaactaaagacagcaatggttagtgcatgacaaaacccagagtcacacagtgcatgaaccattcttccagagcaaaggtactttccagccattatttttgtcataccagtaataaacaacaatattatgtgacagatgtttcactctggaggctcaaatcctactgggtgtacaatttgagcacacattcccagattgtactacattatagaatatattatattactcctgggaatgcttgtatctgaagtacatccacatttagaaggtcctcccaggctgccttttcacacattgctcccttcttatattgtgttcatggtgttatcctatcctcaacatggctccattcagagaaaaggcccaattctattgcttttttcacaaacttagagtttattgggtcactttgataaactgtagggctcagtaccacacagaggataatgtatgtttggattgtttcagtgtgccacatttagtaggcagctctgtcctgcaccaagtggcctttgtattattgtaagtccactggaaacaaacttcacaaagaaccattgttaaagagtaatcttttttttttctagtgggtcagtttaccagggcctgttttcatgggttcaagtatgaatgataatctgttcacttatgattattgtagaatttataatacaaatgaattttgcatttatttaaaatgaaattttaaatggcatggattcataagctctttcaataaagagctaattaaaatctggtccataacaatttctttgtaaggggcatttgaaatctttggattgatccatcttgctgaagcaaggggataaaatacagaatggtgaataagccattttcaataatttttattacaacaattttatacctatagtaattaaaaaatcactccaattcctgtttttttgagttttttctataaatcaggttaaagtcagagcttgtgtgtagccttgagataataattgtgaaactgactgggtctttgcatctgaatatcaatattgacactccttcaattttcatggagccactcggttgctaggagacagttctccgtggaccttccatgtgtgtggtttcttgaaagcagaagaactgtgttctagatcctcttttcaaagacatctgaataaaagatgtgcataggacagccctggaagactaagatgctctctctctctctctctcacacacacacacacatgcatgtacaggcagcttcacatcaaagctaaaggtttacattggatatcttaatagcctgccaccttattttccaggacaagggtctctcacagaacccaaagctagccaatgaatttcactgatctactgatctctgtctcctaagtactggtattactcctaagtactggtgtgccactgtgcctggagttttacacaagtgcagggtatctgaatttagttctttgtgattacccagcaagcactttaccaatgtcatactcactcccacccctagagttaagcttctctcttaaacacaaccatttgcaaatgagggagcaggagaccaaagccagtgcttccttcatggtggaaaacaaccctccttctgaactgttctcaggagaatcccaattggctgcctttgcctcacattgctaggcctcaaagaatcggcatgagaagttccaatagtgggcttctactattgttgtgatcaatacaattggtttatcttatgttcaaaagactcttgctttttgtcagaccccttcaaagtgatggaataacttgttagcttgataataaacggaaatcgcatccacttcattgttttgaccccaatcttgccattttgatctagtttttaaagttctgttttaacatatgaactgagacttcagaaagacaattctgcctgttaaaaatatataaaaaaaatcaaccaagtttttaatgactatattattgtcaaatgtgagtatgtaatcaggcaatggagttgacccattgttttctaatctctaaacagtttaagttggcgttacaaagattaaaacaaagaatgaaaatggttaactcataactttcaacttatggttgagaaaatgaagtctattaattcagtttagtagagaagagggaaatctaaatcaaatctagggaacagaatcaatagactattatttcattttcaatggcatgcttcatggaaggaccatgagcatgataaaccaccaattgatgggctctgatgcaagctatcccagtctatccattgtgctcaggcatccagaagatgaagatgaccgtagactcttcctcttattttcccccagcactcttagtaacaaagtgtaaacacgtctgaagaaagcaaagttttcttgggaaataaatggatccagaatgtgatgcaactgaatcaagagaaagagtccaaggccctggggtagaacttcctggatgtgtgtacaggagcaaatcagagagaagcagggcattctaaactgtaaatgcaaaggccagctaagaagggactcgatgcttctgatgctagatcacctaagacactttattcagggcgctcactgaaacctctctgacctccatccagaccatgtgcccactgtttgatgatcctctctatcttccattcatgttccctctaagtggaagcgtctatctctcttgctcttatgggggatgaatttcaagtgtatttcctttgttttcaggaaagcagctgcttttccttttcttgcctctcattccagtttggagacaaggttccccatggaggcatttcagccagatgcattaagaccatttttaaaaagcaaacccaaacttcaatcaggcgctggctctaagcagcacctttgacccacacttgtgcaccagcatctgcagagatgggagacataattatactcctcacttctcagggctctgctttgggaccttgaaggaatccagatttcatttctcaccagaatggacacagacacccaaccctagctctctgcttgtttttgttttctgttctattcacaagggaatcaaaaagaccatctggctgccaataaatgttgtgatccactaaatatctccacaaaatagcttatttttttctaagtaagaggcgaggctaggatgagtcaaagaacttgttaccgtaccctcttctcacatgtctcctgtctgtaccaagaagctcatggattcaacttggccaaagggacttgtccactaagtaagacccatcacccaagtgtaagaagaatttttttttcttttttctatttcctttcttctttgttgttgtcattcttgtccccattaaaggctcaaggttctccttgacacagagttggaaaaaaacatccagacccttaagcacccttcccaggaacagccaaaagaaaggcattaaaagaaaaaaaaaagccatttggcagaggcaaacacttattcccatggaaaagaaaaaataaaataagaaactgagcttgttgctcatctgagggccgtgtgggtcccaaagacactttatagcaaacatgtgcttcctgtgatctcagggtgaccactggcccagtcagcacacagagggaagtcaaatttcacagggtcatctttgcagaaagaaaacttggctgaacatgttgagaacatggcccagctggtgcctcgctgtatgtggggagcaaattccacctctggggcactgaacacaccctctgggccctgggccagtgatgactaccagcagcctaggcatgcaggcagggcaggttgggagggagcggccattgtgaacgaggtgagaacattggccaaagtggaaaggaaccagccagccaaggcttggttggggtcaacacgtgtgggtctgtaaatctccttcatagatcattagtgctgaaagaagtctctggaggtcattcagtggattcctcagcttccctgggtcacttcaacacatggctttccttccaggtctcatggattttcaaggaagaacacgcctgaaatttcttttctctcctcttctccttctcttcctacttccccttcacctccccttgtccttctctcctttttatcccctccctccccctttctttacttccttggttcctttctatcttgtaaatgttctgcttccttcttcttggtggttggacactttactaatgaggtgaataaggcaaaagttgagaaaataaataaaagcatcaggtttggtcactgaacagtccctgtcactgtatggagtgcaagttgtcttgcaaatatgcaaaagagccagagagaatgaatgaatctgtgtaaggcaatccacagtcactcctggcaaagcaacccgagttcacatgcgcagtaaacagcctttggtggaggacccagtatctgccaagcttctgtctgtactgagaaaggatacaagcagctgacatcctaccacttcatgaatttaaccctgctatctgccaccagggagtgagctgctcgaagtataaagcccttctctcactgtcctcatttcaggtttccaaattcactgaacttacgtgaattagtgctagcctcagaacaatgtctgtgatagactgaatcattagttctgttttgtaagtaagaacattgaacttgaaatggatctaacagtttcccccaggaaattgtgcaatgataaaaatttgaactgcctggttacagagcccaacccagagtacataaaaatctttgacctaagcagtatccctgccccccctttttttaccatcttgctcacatctctttaaaaaattctccctgaggagtcctctttagattggttgtagatttattcagaactgttgatcagcatttactgaaaacctcttatgctaagatctaggcaagggtagggctggagagctggccctgtggttaacagcacctgctgctctttcagagacaagagtctggttacaagcgcctacatggtagctcacagccactgtaattccagtcccaggagatctatggcttccactggcctgtgagggcaccaggaatgcatgtgatacagacatacctacagtcacaacattcatacccgtaaaataaaaattaagaaagaagcaagcaaggggttgggaatcccatgagatgtgattcctaacttcacaacattgtggatacagggaaaggagtaaggcataggccatatgaggaggggatgctacaagagacatgggaaccagtgagtgaggcaagacagtcaactgagctcaaaacaggacagccaaggaaatctcctcagaggcgttggcagagaagataagtgtacatgtgtacatgcttctccgtgttggacacatgcttgcatactcgagtgtgtataccgatgtctgtgcacataagagtgcatgcatagctataaatatgcctgtgtatgcaacggttgcatgggtgtgtggtatgcggcaatcaagctggtcatgtgacaacaggaacagtgacacaccctgggaacagcagagtcctacatcaacatggcacagataaggtattttgggacgacatcacttaaaccacaatacatcttttaagcctctatgtatgaccttattcatcttgtcacttctattcaagtgccttgtggatatatgctgtattttaatctaaaaatatagcagggagaaatggtggcatcatcttggaaatgccttcacctgcactctgctcagataacaactgtaatctctttggggaagactggagacagacagcccatttccagatacctagtgaccttccctgccactgcaaagcttctgatgtgagtttgcgtgaaggtcattgtttgtcaaaacccagtttccatgacaggcagaatgtttacatggagacatcatgtgttcaatctaactggtgtgattacacatggcttctaaccaatgctggataggaactgggtgctggtgtctagtttgcaaatggtttctcatgctggcaggggatgctgacaatttcagttcacattgctgaagccctgggctgaactccattgcacgccctgccacactgtacatgttttcaatcagttctacgaggccgctcttccctctctttttcaatgtcaaaacttaacccacacacagtctcacgaggcacgaagatgcctaagccataatgctgagttgtacgacctaatatccatgtaatgacgggacaggctgcagggcacatttggaaataatcttcagcctttgggattaagaccaagggcaggaaataataaaactgtgtgaaactataccacctccctcttctgctcccagcattctgcaccatgggttgagaatatctgtgttccacaggggtcaaggccatgttaagcaaagctcaaagacagaagagcattcagttaagccgtgagcgagcatctcggggaagtcggaggcgatggtgggagagggagggttagccgcaactgatatgcagatgttggaagtctgtaaacatctcatcagacaaatagacaagggcagtgctttcccgagtagcatgcacttaacccagggaacttaatgacacatgatttttatggagccaaggaactcagtaacgtttgtcaaagggttggacactggtggatatggataacatctgtggctcagctaagtgagctgaacacaatgagcccggcccatccactggctttcgctacagacactgactctggcagagtgtcttcaagaaagggaagagcccagtgggtcaagggccatgtgttcagctagctctgcattgctgtaaccaatcacaggtgaaagagagaccaggagatctccaaatcttccccatgactacctgaagccagaaaggcttcagattccataatgctgccacctgtcacgggtgtgtttccccaccttctcccatgaaagtatttgctagtgattatacttggccagatatgtgggattcctgcatggacttacaaacataatgcacattgttagcatgaaaagatccaatctgatccacaagtacacgtgacacagaagaaatcctaggtcacaaaagaaaagacatagcaagagagtcactgaaggtacagggacagtctctatgtagaatgtccccacgcacccttgatcatgtattgttcaagtggcgaagtcaaagtctgataagaagcagttgcttcacctccaccttctccattttctcaatggttcatgttctttaagaggcatataaacacatcaagaagttgttgctgagtttggcaaaatagcaaaagcatgaccgtattttctcttttattccccaagggcattctaaagtgttttaaagcaaaacagaagacagctttgatctaccaagcgctccctgtaaagtgcaggtcatcaagttggtcaaacaatgagttggggagttgaatgaacagatcttaaacacatcacttatgaacatgccatcagccatgaagcagtatctagtagtaagagtttagccacaacatttatcatcgaccagactttcagaaacacagcaaagagtcatttccaacttccacgtgggtagagatagccagtgatttatggctttcaatgacttctagttctagttctaacttcacaagcgtgggacatttaaagttcaggttccaatgtcactgctatcccttcattgagggaaacaggatttctgaattctatctgccttactcaacagagaaagtacatgagggtgtgtgtgtgtgtgtgtgtgtgcgtgcgtgcgtgcgtgcgtgcgtgcgtgtgtgtgtgtgtgtgtgtgtgtgtgtgtgtgtgtgtgtgtgtgtctgtgtctgtgtgtctgtgtgtctgtgtgtctgtgtgtgtgtgtcggtttgtctttgtgtttaggccagaggtaattatcaggtttcttcctcagtcatcttagtttctgagacatggtctctacttgaacctgagacagacagattcatccaggctggttgtctagtgagctccaaggacccctctttctctgtctcctcagcacagaggctgcatgtgtccccacaacaggcttctttacaggggttctggaagattgaattcaggccctgatcatgatcaataaatgcttaaccaactgttccatctcccagattctccacaaaactattttggtttatccttccaaatggcacagtgactatattgggcattcagtgaaagccatcctagttgttggtaatctttcttccttgaattttctttttttacagtactggggtcaaactcagggttttgaatgagcttggcaatgtttctaccaaagaaccacacctcccaccctcatctgagaacattttagcaagcaagtcttctgagaccaagtcctgctgagcagtaaccctggaaacacgttcttctctgtaaacgcttgttctttgtcattgccattagcccaggttaggatccatccatgttatgcctgtctcaccacttcctagatgggttttctcaatccccttccaccccatacccactgtgctttgacagtgaggtagacacactagagcgtcaccaccttgtcttgctgttcatgtcattcctaaaatacaatatatgtcctgttattttttgcccataaaactttaattgttcacttctaacatacagcatcaatattgacttctaattacaaccacaatggagtggttcagaccaactgtcactgttgccgtaagtaaccagaaagcagactaaagatatcagacagcaatggtaaacactggcaagctgtccatacaggaacagaagaggggtcaagaaaagtaattgcaataagaatgcagggttctgtcaaagcccatcccatcacctggagacgttttgccaggaaggacctacagtatcagagatagaggaagtcattcagagagccccaggctactagagtttgcagagcagtgtgtgacatagacagccactatgaagaaacggaccatagtctgcagagctatacaaaggttcctgcagtacttgtctgatggagagcacacacagtgtgagactcggaagtgctggtgaagaacagacgttggaacacagtaaactctaattctgacacagcttggggaaccctttgtgctctgaccagcagggcagagaaactcagtgttgaatactaaacatttggaaggaactcctggaagatgtacttcaagagtacatggaaaagctagcagaaaatccaaaatgtgaagaggaaaagctaacaccccaaatgacataagtgcttcacaaacttatactctgtaaaaggagaaaacagaagctagacatttaacacagaaattaccaggtctagaatctaatcaaatgttcaagtcatgtgaagaaataaggaactattactcacaagcaagagacaatattcaatagaaaccagccaagatgcgatatggaaatgattttaacaaactacatctttaaaatgataacggatgggcttgagggtgtagggaaaacatgaatataataatataatataatataataatataatatggatgggcttgagggtgtagggaaaacatgaatataataaggaagggaatgcagagtctcagaaaagccctaaaactgaaagaaccagcatgtggaattttaaaaatcactgtgtgtagaaaatagcagaccacagaaggaaagatcatcacatttacccaaaggataatgaaagaatacaaaccgaaatagagatgcatgagaggagctagaaagcaataagcgggcaccagaggcccaggggaggatgtcagacatctatttcacgacttagaagtaaaggaattgcggggaaagaggagactatctgaatcaaagaacaatccaagagctgaaaagagacaaaagcagtaaatttctaaccccagaagatcagggagcttaaagaaccgcataccacaagcaatggaaaccaacagacctcacagtcaaatgaagacagcaaatgacacaggaagaaagacaatgggtgtaggaatagaagaaaacagcacgtcccacactggcatccatgtccaccgctacactattcacaagatctgggggaagaataagccttggtggccaccagcaaatgaatgaataaagaaaatgtgggtccatgtacacagcagacgtttattcagccatgaagaaaagtgaagttgtgacatttgcaggacaatggatggaaactatattaactgaattgacccaggctcagaaaaacaaatgcctagattccaatttttgtgtgtgcgtatgtatgtgtgtgtgcgtgtgttcatgtgtgctggggttgtcaatttggacatcaagctagaaagaggactacaaaagaggctgaggaaggaggcctttaaaaagttggggagggagaaaggaggttaatgggttacatgttatatgaaaaaagagatggggctacttggaaggggatgagagcgagcaagaggccaaaaatgatgagagagagaggggaaaggggaccaacaacaaagtattagaaaaatgccacagtgaaactccttactttgcatgtaacataaaaacaaaacaaataaaaagaactgaaaatattaaaacaagctggataacaaaatcaagaatgcccatgcatggtttaaccaagcctaagcttgcactgatagtcactggtgaatatcaatctgttaaaggaggctaagatcagttctaggtggggtgcaaattaacccaaagaaaggaccagatgagagtataaaaggctctttcatctatcatttttaaggcgtatacttgactatttaaagacaaaataatactgaagtactgagtggattaacacataagcatacatttaatttgtagacaagagaagaagggatggtgtataaactagaccaatgctgttttaaactcttatattaaaggtggcattttgtagtgttatggaaatgcatatcacggtaagctacagatacctattgtgaaccccagagcaggcctctggcaatacctttctccaatgaaggaaatacatttgtactatgaagtgtggtagcccttaaccacatgggacttaatgagtagcagacctgtgggtgatatgggctcagaactgaaccaaggaaaagtgggtagtagctagtggcttaggcaatgcagcctataataactactgaaaaaaaagcaacattatgtaaaaagcatacaaagatacattagctaataacacaataaaggactaaattaatcaagaaatcccaagaaagagaaaaaagtaacaggaaacaatgaacagaaggtttgaaagctagtcaaattgtgtctatggtttcttaaatacaaatgaatggggtgatctattataaggcaggtatgctagactacaacaagcatcaagattcaattgaatcagctatgactgtagaagtagacattaggaaaacaagtattaccagtgataaagcaggatgctgggacatagagatagctcagtagataaagttctgtgacacatgcatgaggactcctattaaatgcccagaacaacataaaaaatttggacatggtggaacacacctgtgatccttgggcttgaagacagtgaaggggatcttcagtgctctctgtccatacagcctgacctaatatgcaagcttcagttcccagggaaaaagccttctctcaaaaaagcaacatggacgacacctgagtcatgacattggaggttgatgcctggggtccacaggcatgtgctcatgtacacatgagtacttaacaccatacacatataacacacagacacacacagagacatacatacatacacagagacatacacactctctcacacacagacatacacagacagacagacacatgcacacacagacacacacacacatacagataaacagacatacacacacagagacatatacacagagagagacacacatacagacacacacacatacacacacacacacacacacacacacacacacacacacacacacaagacaaaaggacttgagataacatatgctgctcctgtaaaggctctgatttcatggccagcatctgttgggtggctcacaatcacctgcaattccagcttcaggggatctgatgcccacttctggtctctgcaggcactgcatgcacacatgtgcacacacacacacacacacacacacacacacacacacacacacacacaattaaaaataaaaaattttaaaataaaaaattttaaataaaaaagaaggttaactaataacaaaggaatcactcaagagactttggcaaaactacaaatggaaatataccttcttacaagaccacatggagaactcaccaaggtggaccatctggtgcacaataaaatatgtctctataaatttaaaaggattgaaaccagagtatgttttctgaccacaatggtattaaattagaaatcaaaaccagaaagctatctgccaagtccttagatatttgggagctaagctatgtgctctaaaataaccacacgacaagggagaaaccaggaggaaaatctaaaaatattttgaattgatgaaaatgaaaatatgtcagaattcattagatgatacaagtaaaatgcttagaatatttaaattcaaactttctactttctatgacttctcctttacagtcttttaaaattattgacaactctaatgagcttatggcactttttgctctgaaaataattaaaattgagagcttaaaaatacattagcaaatttagagattaaaataacaagccattgttgattagtataacttaaacttttacaagtatatcttcctatgagttaatgagaatgatactgtctcattgtctcacttttttatatatttctttaatcttgccttctcaaacacctttccatttaacatctgcactgcctctgctccattgtcatagattatttgggttgaaaagtgtgaagaaaacccagcctcccatagacacctagtaggaaaggtttggtgtatcccaacagtctttacagatggctgtagatggtagtctcaacactgcgtccattattttccaacactatttgcaatgaaatctatagcaatatcaataaatctctcacactaaggtcgttagaatccatgacactgctctctgctttgtatggcccattcactcacagataataatggaagatcaagcagtcactcagaaatttgaggttcattaaatctatctatggtttggactatcaatctacagcataatcacatctatgaaaagggtgccatttgaaaattcagagaggagagaaaattcaaatctactataacagatctcctaatttctaattttctgaaattccaattgtcatgacttgggaatatggctcaatggtagaatgcctgcctcccatacacaaggccccaagttcaattcccagtgccgaaaaatgaaatttgtttttttttttaacttgagagtttaaatgttaccattagccatgaaaagtcagcttatttcttgaagtaacaacaccttctctttcagttgtgagaaaatggctgccagctatgcaaatgtctgcctgacccaggaaagatgagtgtttagtcaggaaaggcagctagttcttcccacagctcagtcaacctttgcccacagcatcttgcagcaatgttcatccgtgttttgcctttcatcacaaggaactgcaaaatgatgagaactcaacaagaaagcaatccaaccttaagggcattgtctcaccagacaagattcatggcataaggaaagactttaacatcagttatccatgaaattagaataatttggcatacaactgccctctactacagtagctgtcagtttagggaaagatggggagcaagagaagtctcaataaatagcagtgggaatgaagaatggaatgtcattgaaagatacagggacacaaagcaaacacagatttaatatacagttcagcattgatgttccttgatacttaaccaattataacatttacatcagtctttataattgccccatctttataattgccccaaactggaagcaacatgatgtttcatggataggggaataaagaaacaaatcttggtatatccataatcatggaattattcagtgataaagggagagaatctatcaagctagtcaaagccatggctgcacattaattcagtgtgctgggtgaatgaatgaagccagtgtaaaggactccatgctgggtttctgtttataggacactctggaaggggcaaaactacagggacaaggaacccattgctggttacccaggggattttgtttggatggtgaatctgtaccacacagcaatggcggatccatgacaatgtgctttttgtcaaaactcacaaagcattatcataacacactatagcaccataagtgaactttaatatgtggaattgaaaccaccatttaggagattggtgctcctgggatgcactgtaggctattacagaagcataacagaattaaagagaccagaagcaacatcattaaaaagagcaaaagagaaagtatcccagaatgtgtctgtcatcccagcccttgggagacctaggatacacagtgacactctgtctccaaaacacaagtaaatgtagaaattgttgatttgagtgacttgggaaatggttgacatctttaagactaaagtcaaaagaagctgtataagaactgttcggtaggtggctatctactataccaagtgctattctgtgacatttggaatgttgagggcaagtttgtatatcaagagctacctctactataagtcaaggaccttctgaactgctcagctgaaatattaatcactgtgtacatgggtgtgtgtgtgggggggtgtgtacctttgtgtgtagggtgggtgtgtttgtgtgggagatgggtgtgtatgtgtgtttgtatgtgtgtggaatgtttgcagggaggatgagggtgtttgtggggggtgggtgtgcttgtatgtgtgtggggtgggtgtgcttgtacgtgggggagggataactgtgggaaggtgggggtgtttgtgtgtgcagaagcctgccctatctgaggctgggttcctttctggagacaatctgcctctcgggctggtgataggcagctgtaaattcctggccctctcaccatgatagacaactttcttcagctcctgtagcttccatgcttctttgtgagaccagcatgtagatccctacaactccacctctgcctgctctggcttccccctgtgcatgtctgttcttcagggctatccccaatgcttctgtccaccttggacataatcattctgcctttcagggaacccaagagtgttggtatgtctctgtatagcatattggtatgttaagggaaataaagcctaagtatgtggcttgtaaaccctttaaaaatcacagaaagccccactgagtatttacagtcatcaagaatcctaaggacagggcagtcccaagccaggatgatgctaaaacccaaatgtcagcagatggtgtaagatctgactcctctgtagccatgacacacaggacctgcctaaataagtgcacctattgaaaatctgactgaacacagatacacagatacacacacacacacacacacacacacacacacacacacacacacactaaatagataagccaataagccacttgtgtatgtggacatacaaacatcccattcacatttgttccaaagcagtagctacaatataggtctatttcagctgctaaagaaaacatcatggagaatatgtccttcagaaccttcatgccccatgctttgtgggaagtatctatctgagacttcctacttctgagcctggctgtcacagacacagctgctcactgaaccttggaagaactcactgcaaatatggaagggacaaatgaaactcttgatgaatttaggggacttttactgatgaagtctattgactaatctgattgaattctatgaagtctattgagaattttttgatggagtcttgtttatcaggcatccagtttcagtggcaaacagtccaaagccccggattcagcaactccacaattgagaaaataaggaatgacacatttatcccagctggaaaactgtttcccacattcagaagtgaaaagacaagcagacgcctgacagtggagttcaatttgaacacaacatttgctgagcttcatattattattgtgcgtttctggataagcattaatcatgctgccggtgtcacaagaccacttcaaagccatgtgcttacctcagcagccccggatgcctgcaggatcacagccatccacactcttgcagtgacctttgtcagcttttcaacagcctcattatttggagcacttgagcctctatagagcaagaaacaactgtcattttggagctcagacaagcagttttcttgtgaacaatagaaaaagaggctaagttcacccagtatagccctttacaagcttctttctcttctgaaaaacaacagtcctcacctcactttgcacttgaagaccatttgctaaaatacaggaagtggatttaatgatctggtttctcaaaataaacacagaaggcacaacaacattccaggtacttatgtagaaggaaaaaaaaatctacaaacagacacacaaaagccatgaaaatgtcgctgaaggaatataaactgattgtaaagaaaaaaaaaatgcaagttccaaattttctactacccagaatgaaaaccagccttgctaaggcacggtggccaaaggcagcttcatttcagactcacacgcagcacataaaaacaactaattagagacaggagctgggagcaacatccggttgtgtttggtgtagggtgggaatctgtaacacgaatagtaaaaacccattgagactcttaatctcagggtcgtgagttcatacctcatgttgggcaccaatttgtaacacaataataataataaaagcccagagacaaatattgggcaatcatatttgtttttgtaattactcatttttgtttttgctttttagggacagggtcacactctgatgatgagaatgtggcctataattctctatgcaatccaaagcatgtcactcttataatctcctatttcagaacccctaggttcgtgatcataagcatgtgttgccttccctggctattttattttagctttttaaatttcatgactattattatcgtgttttatttcttttggtttattggtaaagtgtttcatgtagctcaggctggcctctaacactttatataccaaaggatgaccctaagctcctgatccttctacttcccaaatgccagggttacaggtgtgcatcaatgattcacccccaaccaactagtaaatattggacctataacaacatcatgtataattgtcacgtacaacatgatgctctgaagtgtggatatacataaaagtataagctagccagtgcattgcctcacaggttaaaattttggggtggcagtacttaccacccactctgcagttttcaagaatacaatgtattatcattaactgtactcaacacaatcttttgaccagcattgctcctctccatcccctgagcctctggtgataagcattgtactctttgtttctgcaaaatcacctttcatagattggacatatcagtgagatcatacggtgttcatgggatcaaaaacattctagaagaagaggatttgtgtgggtatgtatgagcatgcatgatcccactgggcagagaacacgtcacctacatgaacataagatgagactctttttaggagcgaagtctatgatggccatcatgagtgaattcctgtctgtctgtctctgtctctctgtctccatgtacctgtgctgtgtgcacacaggcgtgcggatgtccatgtagaggtctgaagctgaggtccgaagtcttccatgcgtgatcgctcttcactttatggaggcagagtcccctgctgaaactgaagcttgccaatttggctggtctagtgtgacagttagtgccagctgccaacttgacaaacccaggaccactacagacggaatgtcaatggagacttatctagattatgttggtgggggtgggggggggttcttagctggattaggtgatgtagggagacctaacctgaatatagcctgggccctgcgctgaatgacgggagagggagctaagcaaaagcgtgcatgcattcttggctctccagtcctgattatgggtgtgatttagcctgctccctcatgctctgattctgtgacttcccctctctgatggtctgtaatctggaactgtgaacaaaaataagcctctctctaaattgctctgccaggaaattttctgacagcaataataaagaaaactaggacatctagttctctaggtggacctagaggtcccctgcctccgtccctccagtgtctggctctttgctcttacaggcagctaccacacttgaccaggttttataagggttctggggattcctagtccagtctccaagattgtgtgacaagcatccattccctgtgccatctcccaaacccagatgtaatgactctcttgaggatcagcacaccattgtcagagactgagtaggcctcctgacctttttctttctgcattgccaatggaaaataagaaaaaaaaacttcaatacaaaataagaaacttatgaccaaggggaagacaaatgccccaatcatggagatcccttacacactactttccatatttttaaacactttgtagaagcaacagatactcaaccaaagtacatttgccttcaaacctcaggatgtgtacagagttcatgtatgtgtgcacaagacccagaagctagatggctcagaggccttgggtagaaccaaacatgactgaattatgctatagtcataggtcagtgcctaactcaatcatcatcagagaggcttcctcccatagctgatgggagcagatgcagagaccaacactcaaacgttaggtggagctcggggaaccccacagaagagggggagggaggattgtagaagtcacaggagtcaaggatcatagaaccaactaacagggctcttagtgctcacagagcctgaagtggcacaggcctgcactaggtcctcagcatacctgctgtggttgtgcaacttggaattgttgtgggactcctagaagcaggaggcgggggtgtctatgcctatgattcgtttgcctactcttgggacccattacctcctcctgggttgcctcatccagccttgatatgagggtttgtgtcttgttgtgtcttgttatgccttgtttgggtgacatccctagaaggcctgctcttttctgaagggaaatggaggtacaatggatcttggggagaggggaggtgtgtgtgggggggggttagaacttggaggaatggagggctggtaggctgtggtcaggatgtattgcaggagataggctgtcgaactacccgtgttctctttttctgtattctagaactgcagacgtttgatgagagtgggcagaatgagttagttggctgggtctttcagatcccttccaggtcccgggtggcacaatttacctggcagatgcttctttccctgtaagagcctaagtgggggagaaatgttaagtgtggcctttcctttaaatcggtgatgtgaacagctccactcgctggaaagcccatgcatctcacttaagtctgatgcccgctgcaagctcattttcaccttagttctgagggcacaagaatacatttcctagtcacaaaccccctgccttcaaatccagatcttgcgatccttcacactcaacttagcaaggtatttgtaaaatgtgtgtgcaagaagggtccaaggagctttctcactaagcctcttcccccagcaatcagaaaagctgcttccctggtaacacacaaggattctgaggaaaggtgttattgaaaggggtttgctactcgaattatttatgacaacagtgaacctaagaggtattgagcttggtcgcttcttccaattttaaaagcattctgttttgacaaagccagtcttcaagtgtcatttttttttatttctgagaagtaatctcatgccctcctaaaatatttaatctctccttcatttagaagggtaagcacacatgtctgtccccatcttgccttgttttcccaaactggtaacatgcagtggggaaatcaaaatgaagtgttaatccccttaaaatttctccctctcctcttgttttgacagagttcaaatcttgtctgctgcaacccagatgtgaaatgacctctccaaggtcacacaaggaggaaatggtttatatatttccactccgaatccatttccatcagagtcagccatcacgggcacacaatacacacacagctccatgacatccactcgatagccattcgctacacagcaggttaaattagacatgtagatggtcaaaacaaaatgaatttcagttgataaaatcttgcctatcatgcatgaagccctcagttagacctttaaatcaggggtggtggtacacgcctatagtcccagcactaaagaggtgaggacaggaggaccagaggttcaaagtctcctcagatacagagagatgcatctgctcaaggccacctgggctacaggagacaccgtctcaaaagcagaaagaaagcaagttggaaaaagctgaacagtcactttctatgacaatgcacttccccaacagtgctgattgaactgcacgactgcctggtgttgttatggagtaacacaaggcagagtggtcaatctctactgaatttagcttttgaaaacaatgcacaagggtgctatacagtcagaaatggaacttaacaataatctgtctagcctgttcctcttgcacctcacacctgagcaatcacagtgcttcctcagtctaactaacgctatcttcctctttccattcctgagtgatccggttgagcttcccaaaatacctctctgatggcactcctgtgattaaactagaacaaaagttttcacaacctgacaataaaatttagatttcaagtggagactccaaattgccagtgttatactgcttttcaacattgaagattttaaaaaagaaaaacaattgttttacctgcccatgtctgtgtaccaccttcatgcctgatgtccttacaggctagaagagggtgttagatcccaactatagtttcaaatggttgtgagccatcgtgcagacactgggaattaaatgggggtcttctggaagagcagcctgtgagtcccacacatctctccacccgttaggtcatttttcagtaacgtctttcattactgccttttattcaagtctcttctgcccaaactactttgctttctcatgcttgttgccagggaatctgcagccactacacctgctactggggcactttctctatgaccgtggtgacaaatccactcatccctcagagttcatttaaaagtgacttcttttaaatgttttaaaatatttgtgcctcttctgaaaggataggccacttctacatgccctatagacacattctgtggattatctcactccttgtcacacctgaacaaagggagttttattcttaattgacaaagtagcctagctttgaaatttttatttgcctgaaatggcacagccatgaagtagcagttaccacagtaagcctaattgattgtgtgccctaaatgtgctatgatgacttttctgctcccaaatttatgctgaaatctattcctcagtgtaacagtgttgagaaatagtagaaccactgagagataaataggttgctatgtggaatcagtgtggtcctcacaggactggaatatcttaggaacagtaggatatcgtaaagcaaggccacctccatctcttctgtgcatgctcattgcttgtgtgatttcccatcaagctgtaaggcaacccatgatgcctctcagaagatttaaatctccagtccctagaagacagagctacatcaaccccttctctctataaagtcacagaaagagtaacttatataaggaaatctacacatatgaacatatccactacaagtcatattcttttcatattattcaaaaccacagagtctgagacactaaggtccatgaccagaactattctcaggaatgtctgctctttcctctttcctctatacagttcatgatccacttttatatacactaagtttaaaaatcaatgaggacaaaacaatagtggtagaataaaagtattacaagaacatgtacaaaatggtacaatgacccaaaagagtctaaaatgatttctacagaaaaaaaagaggtactaaatctagttttagaggatagatgaccatcagctagacaacataggagaaagtcaggcactagatacccagccacattctaatgattcgaatgccttcatgcataaaattaattcagagtctttgattttcaatgagttggtattccccatgatggtttccttttctgagacattaagaaagctggccatacactgcttcctttcagtggaagttgggggaaagagtgaaatagcccaggtcttcaagagaaaagaagacagtctgagttctgtgggatgtgtcttggctcaccaggagctgacctactccatttgactgtcaatgtcaattagtaacagctcttctcttgatacctccacagagttcagacctgggaagggtgccagaatggacccccctcttctttttctcttgacagacttccacaaaatcaaaattcctttcatgtttagtcataaaggaaggacaatcacacaagtcagaggcacagatgttaccatgataaatgggaattggggccaaggcctcctaggacagcagtgaaagtttaacttaagaatttctcccttctctgagggttgctagctttgtcttgatggaatctcatggaagctgagctgtagtcaaatgaggccataaactttcaaataacaaagctaagaccatccatgatgataaaactttgatcttcactacctggaggttagggttcttgacaacaaaaattatgaagattctgggctacattttaaactttaagccatgtgttaaattaggtgtagtaccccttataaatgggagtgaactacctggccatgaacctaatttcccactcagtcaggacttgtctaaaaacacaatgtctgtacaactcactggcttatcagcaagatgaaaatctcctaaaaataaaaccattataaatgataatgggcttatcactactacacagatgagtacacccacaaattcataacacacacacacacacacacacacacacacacacacacacacacacaataaagataaaatgaacttgaaatgtggaagacttcatggaaacagtaaagagaacaatttgggaaaattaggaacattactcatagatataaatttgtgtttattattgttttgtcagctatatattattcagatatgttaagccaaactttggtggctgagttttgtttcttttctgttgccactataaagataccctgacaagagacaatttgggtttgaaagagttttttttggcttagagtccatcatggtgagaaagacatgacagcatgacaacgggagtgtgaagacagaaagtggctgatcacattttatgctcacacaggaagcagagaagaaaacagaagtacggcaaggctataaactctggaagcctgcacactgtgacatacttcctccagcaagtctctatctccttggagtcccataacctccccatatagtgccaccaaccagggaagatgtgttcagacacatgagcctgttggggacagttctcattcaaacgacaacagtgacttccgacttggaaagtgtggttcttgcttgtgggacctgtaatctgaggcccagtttctgctcctgtgtcaatgttactgaatatggttgaaagggagatcctgatttggtatatacaatcctcaggaaacaggaaaaagaatgaggaaggaaggaaggaaggagtcaacacagtgctctaaagctgcgactgggagacagtccacataactcctactctgcttcactagctcagtcacgtgaccaaccctagtgatgtcaatagaccaggaagacaatcgcaccacaaagagagagccaaggaagcagcctatatgaatgaatctcgtaagtgactgaagacacacacgttaggtgtggagttctttagtttaataattattttcaggcttgtcaatgcctttctttccaggaaatgaataaaataagataaacatttcctgtcagttggggggggtgactttaatatacaaaaacaatttaattaagttcagttctgttttctcagcttaaattattctgtgtttgaaatacaagatatttgactcgattgtcactttttagtcatcaaacaatttgtcattggtcttcagtatataagtcaagttgattccatatgcttagctctttggctcttctgtggatgtgctttaattaagttgtaagtggatatagtaaatatgtctttctcctccttttatggctttcctttttaagatgaagtatgatgaatctgaaatcaaataacatagaataaaacatatgtgttatttatataaaggtggtatatctctggtaccccatgacagctctgggtgtcatagcacccagaaatgccgagtgtggccacttgaacatgaagtgcagcatgtgtggcctccctggatcaggatcattaacctcacaatgtcccaataatagcaattctagtgtattccactatccaggctctccttctgttctctcaacccttaacacctcaactatagcccacatagaagtattaccatgtgcagaaagagaaccagtatctcccttgccatgttttccctttagtttaacagtaaatgagggttttctgggttccttaccctaaaacctactctatgtgtcttgttggtcagaaggacatctctgacttctgatgaagcaaatagttgctggtgtatccacttggacatacaccttggcattaagaagtctcatcgagatatggttggattcccaaggagtaggggaaacatattgatgaagacccccctttcacaaaggaaaatctgagatagggaaattgtagaggccaccaccgactatactgtgacctcagaaaggttttagttatgtgaaataaaagcagacttgatataaaatgtgtctcagtctttgctgtctacattatttttaaaaaggcagaatttgggtggtaactgtttcatgatcacaaacctggcaccacacagatactttctttagcagagaacacagggtgttcttcattcttcagattgcacttaagcccctaaaggattccggcaagtgtatggaactttgaacaagggtggccacacaaatctccttaataatgaaaccaaataaaataaggccatatttttgagttttctttttgcttcttttatagaatgttcccaagtgacagactcagacatgtacaaaacagaccagagacaataaaccccctacttcagactcataaattgccaatcggcatctctctctttatgtctaaaatgaagggaaaaataaaatagaattctcacactctttattctagttgtgtaaaatacttttgcctggtacatgaatgttagtgaataaagaccctgtgatgtaaaaatttaaatgttttgattgcctggaggtccaaacaaatctgtatttatttgattctgttcagttagccctagtcatagctgccatgtaaccctctcttgctagatgccagagatacaacaatgaatacactaaggtatacaaagaaaatgaagatttcccgtatatgatatgacacactataatttgtattataattggtttgatttttaaaatggttgcggggctatggagatgattcgatgggtaacagtgactactatgctggcatgagaacctgagctcatctccatagcacccagaaatgccgagtgtggccacttgaacatgaagtacagcatgtgtggcctccctggatcagggtcattaacctcacaatgtcccaataatagcaattctagtgtattccactatccaggctctttatgatgtcagtgtcataagtcaagaggcttcccaacaagtgtcccatagtctttacctgttagtgatggttaatgctcatcattgacttcgcaagatatagaataactcagaagtcaaaccccagggagaattcttcaaggatcttctagatcagttagcctctgggtatgccagtgagagattgtctagattatgttaactgtggtaggaagacctaccctacttgtggatgtgaccatttccatgagctgggccctaaactgaatagaagtgagaaagcaaattgtatgttaagtactcatgtcgctgcttctagactgtggacacaaggtgacagcttcctcaggctcctgccattatgacttccccaccacttgtacccttgaactgtgagccagaacaaagccatcattttataggttgcccagatttttcacagtaaggagatgagtaacaaatacactattcttcaaacacccttcccctggtccctgttctacccttgggaatccagcccatactcagactaaatgtattagtagagggcatgacttggtaccagcctatccacccacgtagcacaatggcacttccaataaaatcttctgaagacaagagtctgtcactccagaggactgcccatgtggcagaaactgaagcaccaactcagtggttaaatggcaagagcatatcctgggacaaagaccttcacaaacatatttataaaagcaaacacactcacactttccttcctatgtggaaggtgaaccttgacttgaaggttttataacattatgactagggaactggaaatctcatacgatttccttatctctcaaattaggatgcccaggaacctcatcagaaactctgtccaaaactttccccttttatgatcttcttaggaattgtcatttgaggtctgtaatgtgaactctcgattttcagatatccccaaaacggtttcgcaaataatatggatgtctaatagacagcttgtgttggtgcctgaaagtacaaaatgtggtgctatctacatgttcccatcaaagcggttggctctgcagtgcacaggctaatcaccaagaatctgtgagcagtttcacagaactgtgtgagtggaaaacactcaggctctttgtgcagcacgcccactcctctatcagttaagcatctgccactccttttgatggatgaagaagcaagttgcctaaccccatacactctgtattcactggctgtaggaacacattagtagataagcacagtcaccattgaacacagacatgaaggagtagatgtacaggtcttccgcagtgaatccaagggcacaaaataagattgagaactcacctgaactataggaaacgtaagaaacccttgagtgacaatgtcagcgggtggcagagcattgagccacagggtctcagtgtggcatcatgatggatgttccctttagagtgcactggtggccaaacctgggtactccttgctggagttttgctccagtttcacacaccccctagtctctttctgttgatgatattttctgcagagatttaatctaagtatgattctctagtgattgcttgctaggccattcccaggaccagctacttggttcttttctctcttggccactctgtttcagaagttatactcaaaaaacatagcaacaattgggatctaactacattttaacacaacacattcgtgcttctgttcacactggaaaaggtaatctgaatagtctcagcatctggatccaattacagcaaagtatagcactcagaatggaagagactttctacatttgtgtggaattcaggcagctgctggagccacccttgggcctagttgtttcaaagagatttgcaacaggcttaagtcagaaatgataaaattgtcaaaaaatttggaattccttttggaagacagctaaaaaaataaaaccaaaacaaacctctgaaaggaaaaaggaggagatttctgcctgcaaatttttaataatatagtttattgggtcaaatcctggatgcatatatacatatatatgtttgcaaatttcctctcatctgtaacattggatatagtactacagattacatatcacatgctttttttaaaaaaaaaaatagggacattagttttttgttttctttttttaaaaaaaaaaagcagttttcttgttttatttaaatagcctaaattttactgtttggtcattaaaatccatttggcaaactggggttgaatctttatgttctctgtttttctaccaaacctcatatcagcatttttttttttaaaaaaaagaaattctgtttgggtgatggctcaagcctgcaattctagcatttgaaaagcagagacagaaggactctgcaagtttaacactgtcctagactgtaccacgatgccatgccaacaaaaacaattaagaaaagagaagagagggatggtgggaaagaagaggcgggtgggatggtgaaatggggggtggagggaaaggaggcagcagaatgaggggtggaggaaggaagagggaaaggacaataacaacaaggatggaagggagatgggaagaaagaaccagggagacaggaaaagaggagcggggaggcatcttaggcaaagctctagcgttgtgaagagacaccatgaccaaggcaactcataaaagaacgcgtttaattggagctggcttaggaattcagaggtttagtccattgtcatcgcagcaggaagcatggctgagcgggcagccatggggcgggagacggagctgagagttttacatctggatccaaaggtaggaggaagggagaaagacactgggcctgactcgagcatttgaaacccaaccacgctgggacacacttcttcctacagggccacacctcctaatagtgccactccctgataactaaacactcaaatccaggagcctatggggatatccctactcaaaccatcacaggaggaaaagagtggtcacaagtgaataaccctgaataatgaatatttccagctgccctccaccccccacagacacaggagacacttcccatggcccccattagtgccccaaaccaccaacagtgacaaacactgagtggactgtgtcctttcctcagcatcaatgccatgataggacagttttatgaagtaatcatagcaagggttaactagagtaacaacgtctatcataaaagttacttaagatttatgaattgttcattttctggttttgtttgttgctattgttttgagatagttttgtgtagcccaggctgacctccaactcactgtgtagctgaggatggagcgagatttctgatccacctacctctctctactgggctaacagctatgcctcatcatgcctggcttatggatcaaacgttgctaaggatcaaacgtgctccttcatgcttgctcggtaagtgctctatctaccactgagctacagcactaaccccgccatccccagcccttaaaagctcagaagtgaatttccctctagtgtttgggtaactaaaaccacagaaagcaaacctctggataagtgcagagcactgtctattttagggccttttgtccacagacgaccccctgggttatcaaagctgagggaggtcggaggaggtgcagctgggtgacaggctttgaatttcagctttaatgcaatttcagagtttgagactcatgcagcaaatagttttgacaaacccagacccaataatcacccccatagaatagaaagccgtccaccattaagcactggtctgctgaggagaaatacaaagtcttaattcaaaccatgtccactcttacttggaagccaatgagcaccatagatccattccattttaatatcctagcacacacgggggggggggggcatgctacacctggagcctggccataatatttgccagtaaatgacagacgtccatctgtagcaaatattatggtgacttctttgcacctctaatgcactgttttcccagcttctgactgtcagaaacaccactgtcccagcttggtggctacaagtactgtgagcagcggagcaggtcactaacacaagaacaaccattcctctttggctgggaggggaaaggaaagaggggaagggactcccaaggcagtggggctcctaccgactcaaaccagatggccgctgcctgaagtctggggagccaacttcatgtgaataggttattcggtggcctttcggcaattcgagcagatgctgctatgattagctgcaaatggaaatggttttcttcctttggtgctgtaacattacccatgcttaaggtgggctcagtgaggtccctgttgggtttcaggaaatatgccatcaaagttattctcagaagttccaggactacattctgggtcctaaattattttggttttcaaaatttaaattctaaagtatgtgtttagaaaaagatgatggtggtggtggtggtgatgatgatgatgatgacggggtggaaggcaaaacgaaaggtccctttaagttcctcttctctgtttgcttagacgttcagtcatccaagaggaagcctagggaagagcctgtcatgagcatcggaaaccatctcatgaatgacacttcctttacaacattgtgctgcaacccgtcactggaaagcctggtcgttaatttcaaaaggataattggaagagagaaaaggatgtctgtgctgataagggtcagagagcagtcacaccgtggcgatggaaaggcaggaagaggcccaacaagcagtacgtggctggtggccatccaaatgccatggtcagtaagagggcatgtgagttggtgttaacagctgcaccaaaatgtggctggaaaggccacctacatcattgacttgatctttacagatagttagcatattcagtatccttttatacatgaggaaggcaaaccccattggtcctgtcagtagagtcttctgtaggaacatcccaaacagccatggcctcatgtcatcagcacggaattggttctgaagaagcagcacacagagatgtagctacctatgccattgtaacaggttatctagaatgaggtctacacaaacatccaaatggatgccatagtgatctccctgtggtcatgaataggtggaacaaggatttggccctgtcatggttgatcccttgctacataacatcatggggtagtctgttgcctactttagagactttaggaaatcaaaggacagtggaaatatttaggcgaatgggttgaggaggtggctatgaataaagactctgctctgtaagtgtgaggatctgagtttaatctccagaacccatgtaaaaatgttaaacttggtggcattcacttgtaattccactgcttggataaccagaagcttcaggtcatggtaagagaccctgtctccaagagaaaggtaggtagcttctgaattgtgacactagaaatcaaaatagacccctgtcctacaaacaaccaaacacttgcacacacattaaaaacacaaaagtattttgtagttatacttgtatgcatgtgcacattttctcaggacacatattgttgctgaatatcattacattatagtaaatgtgttgctttctgagcatgtagggcatctgtcacaattaatcagcctgctattcgcatgaacaaagcaaaggcgagtgctggattctggttaaatgctattggcaaaagcagctgttggagtggttttggccagggtcaacagtttgctgctctacacaataagtaaataaatacttgacagatgttaaggcagagagcaagaaatattaacaaagtgtaggggactgaggcatggccattaagggctacgtcagagcccatatctcccttgtaaccatcttttgtctgtcctgttgacttggatactcagacagactctggggacaaaatagcaaagttactttgtattcctgacacattcttttccttctcaaaaacaaacaagcaagcaaacaccaaccagaatgggctactggtgacttcttatatggattctgcttaatagtcaccctagagttacagctaagggacaagggcagagcacaaagtgaagagtcaccttccgggaggtatgctgagtaacagtcattcaaatactagcaaggcccagcttcactttgtccctttgctgatcataaacatgcaaaggaaggcagagtgctggaccctgactctgaacttgtcccagtccacaggtagagaagacaacacagtgcagttctcactaatgcttggtgagcagccaaagggcacagacaagtcaattctgggaaagcacacactcttctgtaataagggtccatatggactgacctctgctgtgagcatgctctgtctatactatggacctggatggaccaacttctgctgagagcatctcttcctttctcctggcacaagtgagcacatgcaacctctgccagttcatccaacaatacatgccttgccagtttgggttgagggtttttttttaagatttctgtgttttttaatttgaagtatatgactgtctaacctgcatgtgtgctgctgtaatgtgtgcgcccagttcctgcagaggtcaaaagagagcatcagatcccatggagctggagttataaattattgtacaccaccatgtaggtaccgggaatggaacctggaatcttctggaaaaacagctagtgttcttcactactgagtcatctctctggctctggctttgggtttgaagggaacactgttttgctgaagaagggtctgttactcataggtggagatgcacagaagcaagcaagaaaggaggaaggcagtctgaacttattgcatcatctcataggcttcccttgctggatgaagaccctgactatacatgactatgttctttcccaagcaaggggagatggggctctttcccaccaagaatagaataggaaagacccatctttctggccagtccttagacagtaagactcagactcctgggaaagaaaagctctccaaagctctgcagagttgtcttgtattaaaaggagaaaatgtggggttggagtgatgactcagaagtacttccaagggttctgacaccctcttctagcctctaaacacataacacacatatggtacacacacacacacacacacacacacacacacacacacacacacacacacgcacacacatgcacacacacacacactacatatgaacaactatataaatgttgactaaagaaaagccaccagccaatgactcagtatttgattccacagaaacttagaaagttatgccattactactttgtcctcaaggagacttatggattaaagagcattcccacttagtatattcaattctccttaaagagctatgtcttcactttacctcaaccccaaactcaaactaacatgtttggttccaagatatgaaaagaatctaattcacggatacttctgaaaatgagtgattgagtgtgaactgcaatagatgaaaaatggagctgtgctgtggcaggttggctgttgagctgacctctggacttcctagtctgagtatgtgggtgtactattgctggtcaatatactttgggagctcttggcaaatcacttgattgtgttgcttgatcctcaacagatgcctgtatcccacatggtgagcagatacacacagtcagtatttcactataacattaaattgaaactgacctgggacccaggtacagcatataatagaaacaaagaattatgaatggtgtaactccagagtctattactgttcaaactggctttcttagtagtatatagcccactgacaaaaatgaatgttcttattgttagattatctgttgctcattggcacagtaagtcagtggaatattccatgtgaacttgatttagaatagatagagcggtaggcagaccctgtggctttggacattaggaaaaagagaagtgatttatgatgtcatttctgtttacagatgattcatttttctgtcagaactaaagcatttgttttcagtagaaaggtttcttgcagaggtttctctccaccccactcctctttcccaccaactgttccctctcgttgcacgccatgtgccccctttgcagcccacacaatttaggggaacaactttaacttggaaaccaaccaaaactcagcgcagaagtaagaccagggttataaatgaaaacatccaacctcgtctccaccagtaattccaaacgcttctgtgattaatttatgggaaaggaggagaaagtaaaccagatggaacaagacagaggagcatccttagagtaccacgaggcagctgactcccagggtaaaggcaactggagaaaggagaggctcctgccagatttggaaagacttctctgtgaattctggataaggtgacaaattagaagccacctctctttggcccagtgaaagacaaagaggctagaaaacaatttaccctgttcctataagagaaaggggcaatgggagagggaatgagtctggatacgatttttctccatgaagaaacagctaagaatgggtgccaacgagcatccagacacaccacaccactcatgccaggccacaatcaatagtagctgtctgggaggtcttctctccttgacatgaggtcccagagaacagcaagctcaaaaagaccaagtaggctgcagaaacgagagcaggcgctggatatgctgtgaaagaaaagatggctgggtccgaccaccaaagggaagcggtgtgctgtgaaagccagaagctgagatctgccaaagacaccctagcattaaaaacctgggaaggcagcgacttgccactgcctgggcaagctacatgagaacactgaacacaggttgctttagttggcctagtctccaaacaggtagagctagcgagagaacccagagtttcaaacctaactgtggacaagtggggctcacttgtgaaaagccccatagagttgaagttgtggttgtcagtcagggagggtatctcagaaacaggaagcaagggttcccataaggaaatccctctcagcagaagagatgcaatgacaaagcctttggataactgagtgtccccccaaccccgtagggactgctacaaaagccaacgaggggagaagaaatgatgtcataccaggaaggaacaccaactgaagtcataatcgttttatcttatgtgtatgggtgtctgttcactgtgtgtatgcagtactgacaaggccagaaggcatcaaattccctagaactggagttactattttgaactgccctgtgggtactgggaatttaaattaggtcctctgtaagaacagctggtattcttaactggtgagcctcctaatattacttttatttttgaagtttgcattaaactgcacagctgttatgttttagcatgtgtctcacctgagcaagcttggtggctgccctccctttccacatgtctactctacaatgttttctcaactattcctcacacttcccacacatgacttcctttccattcatataccgattcttctctccccctttccttacctcatctcactaattattgatagatatcccccaaaatctgtaaactacatttccccttaatcagtaccctaatactactctctgaaccacactagggacacgagtgaagtatgtccgtcttctacttcaattagcaccaggatggctatcaatgattgtatctcttattgtactcaaatttcacctttgccaggagtagcaaggaatgcagatccaagagaagacggctcccaaggaggactcctgtaaaataaataagcacaaagagtggagtgaacgatcaagtcagccaaaggacacctaccttgattttaagagatgcacaaaacacaacaaagaaacacacaaaaaaagagaggacggactactttgtgacacctctacaccctcacaactccccagtactgtaaaccaagaaaaataactatataatcatatgtattctgtgtggtgcacatcacgagaaagaacatctggtagagtaaaactctgcccacctcaagactgggacagagagatgaagagagcaggcactccggtgtaattcaggggcatgccccagtggctggaagacctcccaggccctacctcttaatggtttctccacgatctgacggtatcatactaggaaccaagccttgaatgtgtggactatggggagtgcattccagatccaaactctttactggttttgattgcacagcaggatgagatgagaccctccttgccttggattgcttaaactgtatcattcaacttgaatggtggctttgcttgctcactaatgttctccaggtaaaggtctagtgaaagttacctggtagtaatatgagctctgagagtttggtgggagggagttaatattctagctccatttggggaagaaagcagaaaagcctcgcttcattctgcctatatgtggagagaggggagggtcaatcaatcaatcaaacaaacaaacaaaaagtcaccaagtctgtgactcccaggaatgtcatcactttgtccatgtaggtataggtgagatgaagttccagtagctagggaggccccctgcggccccctccaaccctatacccgagtgtgtttcaaggaaatgtcagaaaggttggtttgccaagtctagggcacttagaaagagttagccaatcactgaggaatttgggagcaatacctgatgacagcatatctcactttcaaaagaaggccgggttacattgttgggacagagttctggttcttggaccccaaaaatacacttacatgatgtccatatgtgttaagaagtgactagagaaagtgttggtggcaggctagaaggacaaggtgggacaaagctcagaatttccattttctgctttcctttagcctctctctctccctctccctctcccttcttcctctgcccctctctctgggaacttcatgatgaaagaaagaagaatgaatttttttagaaggaacaaggggacaaagaaacaaagataaacagaatcaagaggtaattgtacactattatttgctaacaaagaattttgtgaattgccaacctgtgtaaattacacacagttggggaaagacctccactcgaagccaactgtaattgcctcatctattttcccctccatcagtgtttctaacactagtgcgttgtacaacagagttataaagaaaacatgtgaaaactttagcctcacagatagtccctcaaaggtgccctctagtggctaggaggactccagggtacagttttctgacctagaagagtgagattgacttccacagttcaaaaggaaatgggtgcttcagaagctcatctgccaggaagtcacttagcatttccattctcctagagtgccacacttgttcattgacttgctgacagacctttggatagaactgccagacagtgaccatttgctcaccacagagaagcaagtgctgctcctactgtggcgggtgggtgtggagtgtcagacctgagttctgcctcaaagcaatctgtgtgatgggcaagagatcaatgtgtctatgttcttcatattctgaagagagactgaacgttctgcacactgacagagtatctccagacctgctgcattggcctcttgtttagatgtaagagcttccagctctgtgaagaaaacagacatccaaccaggtcttcctagtctctaaccagagtgagtgacacagtcttcaaatatggctgtgccttggaagtttagtctgttctgcagagacgatagtcaataaagcctgcctcaaaattccttacaaaccctttcccattttaaaaatgtctacgtatgcccatcccaacccatgtaaatggataaagttgctttttaacaactgtgtgtgtgagtgtgtgtgtgtgggggggtgtgggtgtgtggggggggtgggtgtgtgtaggcctactcaaactttttccctgctttaaacctcttgatgacttctatgattaatttccaaattcccagcataatcaggcccctgcttatctccccagtgattgcccccctctttcattcctgttcccctgtccaaatataacaaccttgtgcattccttcctgccttggagccttcgagcaaatgctcccacctggcactcatctctctttctctctccacttacctagctaatcagtgatacaaattagcattttaaacctgtaagtttctcttttgttaaaaatcagatatatggaaaaaatactcagtgtatgtcctccagctaagccataagcaaaaggaaagaaatcaaacaaaaactgcctcccagacaggatactgtccctgcctacctgtagccactgtgtttagacagatgctgtgctctggaaggccctgacttaaggtgataaggaaacataaacatttaagattaaattaaagccatttggttagctggttaatcaagttgaagctggggtccctaatgatgaggtctatctaattcttcttctacatctgcttctacagaaagcaaacttcagctttctgtaatttttgtttatctaacataaagacaaatagactctcctgaggtcagagtgttctcactgagtgagattccccaagcacctgaaatgttactttcacccctgagtttaaaaggaatccttagaagtttctagccaggaagattgcctggaatgagatgaaaaacgtgttcaccacttttcattgtttcgtcgtcgtcattttatttgcattttatcttgtctttatttgtgctgctaaagcttgggcctgggcctcccgtgtgccaagtgcatgccctgccacttccagcccctctgctgttgttttaaatgatttaacacacacacacacacacacacacacacacacacacacacacacacacacttcgttttcttttttagtaaatccagctgtacaaatgacctatgaaatgaatggagagaaaaccacttatatgctcttttcttacaagtgcttggtagttgcagttgggggtagcatgagctagtttctaatccatacacagacagagcttgttatttccatgctctttcatccaccaaagagtgtgagcattcctcccccccccaccacaagcttcctcagcagctgtaaatcgtatcagttctcattcagtgcccacagaaaacaccatgcatcctccccaagtatctttcatttcagcctcccagactaaaaactccataccatgctaaccatgctcatgaatttgtgtcctggacccagtattattcaaaaatatttgttgagcaggtaaaggcgagccttcctgaaatgaacactggtttctggtcaagaccatgcagtaagagaagaaaactactgtcaggggtggagtctttgtaagagacccaccataagggctaagaatgtaattgagtccaaaagcctgagaacaaagcagtcacaaatgctaccagaaatacccccaacttgcactcatctctcatccctctctcttcccgccaatacactttttttcttgtgtttctgttttctccgcaatgtccttgtagacttgctgttctgtctctttagtcataaagtgtgtgatgccatcataaactcctgcattagctatgaaaaccattaacactgagatgaggatcaccaccctcttggttgtcgaggcagagctgagggatccagatttctccatctccccactttccctctccaagcacaaaatagtgagcacatggcctttgtatctctcagccctccttctgctaataactgatttccccatccagggttacagcaggaaataccatgctaggatgctgtactcctaccctctgagaaaaactggttcatccagaatttactataaaaataggaagaacattaactttcggagctaacaaataaaaaggcagaagttgtttgatgtgagttgcattaatggcaattccctagagagaactcatgcctggagttcatttcctcctcagaacctggtccttaaccactacattgcttcttatttatttatttttctcacatgccacaaaactgcttttaaaattataatagacattttggagaatgagcactatggacaaaagtgttaatattacactgcttaggttcataaattgtctccaaagatgagccagatagcaggagggggagcaatctctgtagacagtgagtatcatttgctgactataagagctacagcattgagacagtgacagaaggttctagtctcagctattaaaagcctaaagcagagtgggacatgactatttctgagcaagtacaccatgggtgttattctgtttctagagaaataacaaaagtgtagatttgaaagcagagcaggggacacactaaataaattatggtacatttactacagagaaagcagtcaatgtgcatgtcagtatggaaaaatgtttaaatgcaaaagaaaatgaaggtcagaacagtgtgttgaatatgaccacattcaagtaagtggcttacacgtagctctgaggaaatagctaaaaatgtatgaatagtgattgactattggcaattcaaatagggtgaactttccactgtagtatccagtttagttaaccttcatagtgaatttggctaaatttacaatcacctagtagatacacctttgggaatatcttttattttatacaagttttaactttaagtatagcttggtcatattcttcccctctcccacgtccttccagatcctcacctgtccctaaccacccaactttaagttctttcacaaaacaaaacaaaataataatacaatagaaccctacaaaccaagaaaataaaaaaatgcccccaattaaaagaaacactaaattataaatgaattaaagcacaaaaagctatagagtctattatttatttaccagctactcatgaacatgaggccctgccctggaggggttcatagactcagtgccactccattggagaagacagatgttcccttttccagcagggataagtgacagttcagttgttatcctttaacctagtgactatgatttcattcattcattcattcattcattcattcattcatcattttaaaatacaacaaaataaaataagataaacaaactctgtcacattgaagttggacaagataaagcaatagtatgaaaagccccccccacccctaccccccggaatctgcaggcagactgaatcggtccctgaggaccctgggatcttgactctgctgagatcgctgggctattccagcccctacagagtgcagagagtgcagaagtgagctgcttcagcccctgctttgggcccaacttccatctgcccaccctggcaaaccctgccccctgggatcttcgacaggatgactcgacccctgaggaccaagcaacccagaatctgctgacatctctgcaccagtgctgctctcacccacctggaaagcgagtgcctcagacctgcctgcacccaacttgaaacccatcagagtatcaaagccaattgcacacacctgaagagaacactggagccatacacaccaggaaaggaagtgacaccaactgtactcactggaagaagagatgggaagacgacaatataagaacacatccaacaacaggaaaaacaatatgacaccaccagactctagggactctacaccagcaagacatgaacatcccaacacagaagaagcagaagagagcaaccttaaaaacaacttcatgcagatgatagagaacctaagagaggaaatcagaaaatccttcaaagaaatggaagaaaagacaaaccaaaagatacaagaaatcaaggaaagccaagaaaataaaattaaacatctgaaggaaacagttcaggacctgaaaactgaattagagacaataaagaaaacacaaactgagggaatgctggaagtggaaaagctgagtcaacaatcaggaaccacagatgcaagcataaccaacagaatacaagagatggaagacagaatctcagatgctgaagacaaactagaagaaataaacttgtcaagcaaaaaaaatctgaagtctaacaaatccataacacaaaacatccaggaaatatgggacaccatgaaaagaccaaacctaaggataataggtatagaagaaggtgaagaaatccaactcaaaggtgcagaaaacatattcaacaaaatcatagaagaaaactttcccaacctaaagaaagacatgccaatgacagtacaagaagcctacagaacgccaaatagagtggaccacaaaagaaagtcccttcatcacataataattaaaacaccaaacgtacagaataaagaaaaaatattaagagcaacaaggggaaaagaccaagtaacatacaaaggcaaacccatccgaattacaccagacttctccatggaaactctgaaagctagaaggacctggacagatattctaccaactctgagagaacatggatgccagcccagactactatacccatcaaaggtttcaatcactacaaataaagaaaacaagatattccacgacaaaaccagatttaaacaatatgtaaccactaatccagccctacagaaagtactggaaggaaaactccaacctaaagaaattaactacactcacataaacataggcaatagataatgctactctacaaaaacacaaaataaaaggcagggtaaatccacatacaataccagtaccaacaacaaaccaaaaacaaacaagaataaacactgaatggacattaatttccctcaatattaatggtcttaactcgcctataaaaagacacaggctaacagattggattcaaagacagaatccatccttttgctgcatacaagaaacacacctcgaattcaaagacaaatattacctcagagtaaagggttgggataagatactccaatcaaatggacccaagaaacgagctggggtagctatcctagtatctaataagatactaggatatcaggatttcaggatatcaggaaatactaggatttcaaactaaaatcaatcaaaagagatgaagaaggtcatttaatattcatcacaggaaaaatccatcaggaagaagtcttaattctaaacatctatgccccaaatacaaaggcaccaacattcgtaaaagaaacattattaaaactcaaatcacaaataaggccttgtacagttatagtgggaaactttaacaccccactctcaccactggacaggaccaccagacagaaacttaacaaagagacaaaggaactagcagaagttatgacccaattgggattaacagacatttatagaactttctatccaaacacaaaagaatataccttcttttcagcatcacatggaaccttctcaaaaatcaaccacattcttggcaacatagcaaacctcaacaggtacaaaaaattggactaatcccctgtatcttatcagaccaccatgctttaaagttagaaatcaaaaacaaatcaaagtgcaaaaaacctaccaactcatggaaattgaacaacacgcaattgcaacattcctgggtcaaggaagaaataaagaaagaaactaaagacttcctagaattcaatgaaaaggttgacacacatacccaaacttatgggacactttgaaagcagtactaagaggaaagttcatagctctaagtgctcgcatgaagaaactagagaatagccgcaccagagatttgacatcacagctgagagctctagaaaaaatggaagcaaattcaccccggaggagcagacaccaggaaataatcaaactgagggcagaaataaataaagtcgaaacaaggaaaaggtcctccctatcttaagggtgtttcccgagagggttagctgaggcagggagacccactatcacctcatgggctgggaaaggagaaaacattcatctctctctgctccccaagtgcagttgcaatgggactgaccaccagtctcatatccccactgtcatactatcccatcatgatcaacggtatcttccttctcaagaatccaaaatgaatgatcatccctcaagttgcttcttgacaagtgtgtgtgtgtgtgtgtgtgtgtgtgtgtatgtatatatgtatgtatgtgtgcatgaatgattttatcaaatcaccttaccttgaaatagtggcacttggtagttgcttcgtcgaggctggatgcctgagtagttggaggagtcccacaatgacttcctcataccagagaagccaacagttcctcaagtacatgtggctagttcctcagtagtcccaatgtggcatcaaaacgcaggagggttcctggggagcagctggtccttagtgatagaaggctagaaatgcctgctctgtcaccagaaaagaagtcagcagcagcaacagcagggaaaactgatgcagctgcaagatgagagaccaagtgagcagtaatcttccttgggccccgccccttttcatctcggatgctaccaggaggtgcccaacccaacccacaattgggttgggtcttcccctatcaattaaggccatcaggaagctcttcagtggaggttccctactcaggtgattatgaattgtggcaagttgaccttaaaaaccaaccaccacaaggccaaaagatgctcaaaagtcacacagcttcagcttatatctttgtggtggtggtggctgtgtgcctctagctcctgcatgtatactagtgggtgtgatgtacatgcaagtgtggaggcagaagtcagcaccatgtgtcttccagcaaatctacaactttttttgttgttgagagtctcttactgaaactagagttaactgattctgcaaccctgactgactaacagacaacccccaggcatcctcctgtcccaacctctccagtactaagattacagtcttgggtcctcattccctgcttagccatcataccttgatgcttcttgtcaattgcctcctactgttgtgtaactagagttttagggcagaaacctgacttctgccagccctaacaagctaggctctaccaccatcctaattaaagagacaagtaagagcgaaaagcaaagactgtaagtttaattaatccaaaagagcagccaacaggttccagtgacctatgtcccatctccaggatactgataagaaatcaagatttcctatatcagagataaactactacgagacaagagagcaagttgtaacagctgattcatgaaagggaagagacagatggaaagggcaaaaagaaaaatacccctaaaaatgtgccaacaacctgcccaatacagtaagttgtaatggggatggtcttttttggaataaatccagaagtgtagactgagttcaccctaggggaagggattgagtatcaggtagccatgtaagaaccacgtctttataaacttggctttagggacttttggaaggtctggcacatgtacctccattttcttgttagtgctgaaacggggtgtccctatgtagcttacattggcttgaccctcccaatcttcctgtttcagctaagcaaaaccagtcagagtccacacatgagcacagggcattgcctactaggaagcaattttttaaaaagtgctttcttgaactacaactaggttggaatcccaaatccttcaccttctaattgaatcaccttaattagtcacccaagcttcagttttccggtaagagagacagaaatgttttccagcatcattagtggattaagtgagataatgcgtggaaaacacctgctctccattaacagattcgtcagttgatcatcagactggctgaatggatcactcggcatctgttggtacagagcctgctagctcaattagaggttgtttgaaagggtgtggtaccatactaggattctgctaggatcccaagttcaaggagagcctaagctacagaacgagatcaactcaaaaacaaacaggatttctgaggattgtcttagggtttctactgctgtgataaatactagaagcaagttggcagaaaagatttatttggataaccataacccacatcacagtccaccattgaaggaagtcagagaaggaacctggaggcagaagttcatgcagacgccatagaggggaacgttgcttacaggcttgcttctcatggcttgctcagcctgctttctaacagaactcagaaccaccaactcagccgtggctccacccacaatgggctggcccctcccccagcaatcactaattaagaagatgcctcacagacttgcctacagcccagtctcacagaggcattttctcaagtgaggctctatcatttctgaagaccccagcttatgtcacattgacgtaaaactgtccagcacaaggatagaaagtttttttataaattttatgtgtatgtgcatgggagtagtatgtatatgtgtcacttgcatgtaggtacccacagaagccagaagaaagtgttgcatccttcccctggggaaggcagttgtgaaacatgaatgggctctgggaggttcacttgggtcttctggatgagcagcaagcactcttacccacagaacacttactgttcccagggtattttttttcaaccatgaaagttttcacactaagaaatggtatgcaacaataaaagcccctctgcgaacaaaggggtctggtcaaaagaacagtgggttatactatcaccagctctggttgttccagcagcttggccactcagctacagaaacaagcagtggtgaggtttgggaatgtgtccatattgggagagcaaacaaggtagtttgaggtcaggaactccatacccttctttagggtcctgaggtttacatagatgaagagctgtagagcaggcaagagaaaggaagacatacacatacagtcttggtcaaagtggcgtctgcttgatcactgtctccgttctggctctacaggttggcccaaagaaatccttattgcctgaaggacaaaccagtcccagagatgcctaggggtggcctgggtgatctttctgtgatgctgtgctatgccaggaatccagggctgctgcaggcttagggcaataactggagatgtttagacataagtttaaggggttgaaacaggaaactgaacaacagaaacattaggatgtcacatgtgcttgtaacttggtgccttgagcaggtcaactagcatcagttgtagacactccttgcatgattaatgtgcctatgtgcagagttaagcaggactgtgacccaaagccttaagacaaaagagacagagcagatgcaaaaggcaggtgaggatccaggtgcttaccctgtcaatggtcacaccttgtagcccaagtgtgattcagggctccatagcaaaatcagggttcatgcatttgttatgatgtttgtgaattttcctttatactgtatcctgggatgacacaataatcgcatcaaatgtaaaaagtaacaaatctcatagccttttaaatttgaggcattttcttacatttattttttaaccctattcatagtattttacattttgttttgtttttctaagctgcagggtgatctcattaaagttaaaaacaaaaacaaaaaccacaaccaaccaaacaaacaaaaaaacagagcagacaagctacaaatcttggcagctgcctgggggaagaaaatagaggaaagagagggggagagagagagcccaagcttttgagtggagccagcatggagttcagacacaggcagccagacagccacaggagaggagtagagctttggaaagagtgaaatacaaagtgttggcttgcttagtacagagagaaaagaaaggccatgcttttctgaataactcggagaggtggacagactcacaaagctgcatggcagctactccataagcaactacacagaaggcaggaattctgggaagaaaaggtatattatctcattaaagggataattattcctcccatctctttagcctacctggaagcagatctgtcaaactcagggggtggagtcttgccttagtcaagggattgaccaacccaaaggaatattaggtctccacccaagccagaaattatattttttccttgaccataaggaaatagttttcctctaatagatctttgctactagtataacatgccttcctctgaagaggtaaccctacaattgatgatgaaattggctgaaatattaatgagcctttatttatttttaattatgtttgcttatttgtttatggtgggggagcacatacacaagtgtgtgtgtgtgtgtgtgtgtgtgtatgtgtgcgcgcgcatgtgtgcgtgtgtgcatgagtgtgtgagcatgctcatatgccacagtgcacttgtgaaggtcaggaaaactttcagatatcagctcttgattgaactcaggtcatcatttttggtagcaagcacctttacccaatgaggtatcataccaactcaaatttcagggttttaaacttctctctatctacacccaattgctgtttgcatttataaaatattcattttccatagcagatacataaagagtgtgtgatagagctataaaaacaaagcaaacatcattggtaagaaaaatggaagcttggaatgtataattttcctctgttcatccatccatctgcctatctatccttatacccatctagccattcatgcatttatgtttgcaatcatcatttcatatctgtcagtctattcacttatccatgcataattcattccaatatcatctatcacctacctatctatttacttatggcttagaacagtcaaattcacaaaaattcagaagttctgttctactacaaaacgtgtattctcttcattttctccattctcaataaaatgaaagaacttagcaaatactttgatcaccctgtggtttgatctgtatctcccatacataatttttatagttttaaggaagacattaaaagtttcatgtttacttcttacaaataaatactacattttcaaataaagaaacttctcagaatcttgagagaaacaattttcattggtttttccacaaaattactcttatctatcacctttatgtctacttttctctaccatggaattattattagaacacatcacagcttcaactataaatagtgcttttagcaaatacgccaatagagcttaataagccccacactgtattgatcaaatgtttcttgttttgttattgattacttaatgctggttccttctaacagttatttatattcatcagtctatagatgaacttaccagcagatgacaattccaatgcatttagtttatcaaaggcacacatacccaataaagaattctctttacattttatatttatttatacaaatgtgtttcttattttgtgatcatttttgtagaattgttcataatgataatatttataataaagattgtatctttggcaagtatttaaatggttgtattttatatatcaaatgaaaatcacaagatttatagttttcctaaattctttcaaaaggtctgccagcagaatattttaaagttcatatttagcccctgtgtatgattataaatatgcaaatataaaatgtgtaaagcacataatgttagttgcactgttgctggtagaatatactttaagtttgtggtatttttctagcagcaaaatggatttggatagagtgatttgtgttttcagtcctagagtggccagtggcctctgtatatttatgtatttgacaaaatgccaaaatgtatttgacaattgttcagcaatagggaaaatcttccatgatgacataagcatgttgccctacagcttgtgctcctgttgcacggacatggggatttttaagagaaatgtgcccactgggcttttcctggacaattcatcatatattattatgcaaagtaaaagctggcagtaaaaagcttggttagaaaaaatgggaagaaaaacagagaattggattaatgtcaacctttaaatttgacttgtattctgtttcttccaagtgtctgtttggaaaatatgaaatgccaacatttcacagaatgatctcatgctataaaaatcatctttaagtttttcctttgggtttagcttagttagctctgcaaggggctaaacagaggcacttgaactgggccccagacacaactaaatttctcacactcttaaataaaaatggattattttgctttgattcggtttttcaatatcatatttgaaatctgaatctgtttctctaaacatgattgattttctgttttagaaaactcatctttccctgaagtaagctttcgcacctaaaatattccagcttttcataagtattagaattaatcaaccaattttgtgtcagtaatgacttacggtatgttcccacttttatggtttagaaaatagctattgtcttaggctccaacgtactagcccaaggtaaaatcttattgtgagccaacatcaaaggctcacagaaatagtgccattttatcatgcagtgtggattaattggcaaattaaaaatggacctctgagtaggaggaagatgtgtaagaaaaaaaaaaaaacagaagacaggtagcaagaaaggtaatgggtggtgaaatattgtcttttctcatatgtgaaattcgggtttaactattttacatatgataacagaaaagagggaggaacagagcgagagggtctgaacatgagcaaaggactgctatgtggatatgaaaatgtcaaaagaaaacacattacttgatacagtaacaaaaaataaatgaagctatgaaagacatgctgtctgtcacctgagctcatttagcagtctgaacgcatgtgatcatgggacagtcactcccatctaattctagaaagggaaagaagttaatggtaagggagagtaagacagttatcctgttctgggagggaaagctagggaggctagacttgctccccaaattagcctcttcataactaaacactgttgggaacgaaacattctttacattccacctgtgcttaaaaaacagagaaaacaacacgagaacaagagagccacatggattgaaatctgctgacccacatgaactagaaatgaaatcaccatatgtaggaatgaattcagggcttggaactgagtcgtagcaggtattataggcagagatggtaagtgatgacttgtttagctctattctgactctgactatgtctcagtcagcttggctgccatatcaaggtaccataaataccgtggcttatgcggaaatgtattcccttacacccctgggggcataaggccccaaaccaaggtatcagtatggtttgtttcggataagagccactagacagctgacttctagattgtgagtaagaataagaaaaccagccccctgtcatatagaaaactatgaagagaggagccagaaagacggggaggcacataaatcaaggctggattgaaatgtcaatctaactgagagtctggaaataggcaatataaaagagagaaaggcggggaatggaaagactaggtgatgaggctggaggaggagggtgcagaggtggcaccggggtgtggctttaaccagcagacgagtgagccaactgcaggaaggagggaggaccgcctgctctctctctctctctctctctctctctctctgtctctctctctctctctctctctctctctctctctctgtctctctctctgtctctctctgtctctctctctgtctctctctctctctctctctctctctctgtctctctctctctctgtctctctctctctgtctctctctctctctgcctctctctctctctctctctgtctctctctctctgtctctctctctctctcacacacacacacacacacagggatggcatcaattctcccatgtgttgtgcattttccgttccacctcagcattttcccctcttcacccagcacagtgctttaatcaccaacctggaaaaccaacttcctgtcaactagcaacaccctagatgcttgcatcagaaagaagatgtgtggctagacggccatttcccccctcgtgcatctgcttcgtcatcatctctcaaactaaccgctatgctttaatcccatcccttccaagacatctcaaatgctagaaggaggaggacacaactgcagttagacaccactgtgtgcagtttcattacaggatgagagctgagctcccttcccatcaggtcacacttgggggtggtggtgtgtgcctgaagttcacagggaactctgtgtggactagaatagcctgccttttgttaagatagtaacatcaaacgggcttactggggcatgtaaacacgtgtcagtgacctagtgtgcacgtgggcaaatgcaacagtgagcatttgctctgagatgcacttcctaaaaattccatggacaacctattattattgtaaacataaattttcctatttaagggaaaacaatgtctttccaccaaataatcaagatatatgggcatattttaagcacacaggcacacatgcacatacaagcacgcatatgcatgtgtgcgcacatgtacacacacacacacacacacacacacacacacacacacacacacacacacttaactacttttcatttctgaaactgaagaattctcaaaggaccattttcaaaaacactaaaggtctcaaaaagcttcccggaacagcacagtactataacttgacaccatgttttagatattacccaataaacgttcgcaaggcagcaataaaccttgcttctaatagcaggcttcatgctgtgctacccaagtgcagaggaaatgaccgaacagaaagctcacaatcagcatccggggcaaaggcatcatcaaagagctgcagagccctgttcgttatgattccgctgaggaagctcagaagcagagccagccccaattccttcctcattatggggcacttaccccagtcttttctaggtgcttctaaatgtgcaagcactcaacatggctgtgtctgaggcaatctgcagtgttggccctactgggttgaagaggtaaaagccgaatgctgtgtgtgtgttatgatgaaacaacatcccttcagctttcttgtgcttacagtcatacagaggctgccagctctgccagttcccagcctcggggcccagttcccagccagtaggcatgagacgagagatgacctgtgttctgagaagtctgtggagtatagagcagacacttgtttgataccttgtttctgtaacatttctctacataaaggctaagagcccttaactaatttcaattcactgttaaagtgacagttcaactcctatttgagaaggggaagctttgcaagtgactaagttctgaacttagaaaaaaaaactggaaaaatatactgcccatgacggaagcatacgtatctctgtggttcacccctttgcccactaaagggaacaactactctgttcaccttaattctgagagaccttgtccttattcaggtgacagacacaccacctacacacctgaatgacggttttctggtgagactgtctacacttagggatgctcaacgttcctttccaacatttcaatatggtgctcttctcaaatcggctgaaatggacatgatggtggtttttttctgtttactagagaagtgaaagaaaggaaagaggaggaagaaaagaaagaaaaagaaagattcaaacatttaaatattttgcttatggtaaaattgataccaagcctagattttataatccatgtgaggcaagggataaattcaaggcagaacctctagtggatcataaacaagcgataaactacacgtgtcctgactcgaatgttcagacaaagaaagcatgtataaggtgtgtgaactccatgctggcttggtccatggtgccctcaaaaagtaaccaactctagtaaagatgaccaaatcctcaattcagttcccactgtgagagctataaaagcctaccagggaggtcaacatggtgacatttctccgttgttgcccctcctattcccaaggattctgtctcactttcctttaataaacttattatttgttctttctgtatgtccacattttcttgggcataaaacaacaacctcgaaagccattggcccagggtgactttggtggttgtgaccatctgacatcccagcttctgatttaagcttaccaagagctaaggaaggctccttcatcctcaaagaacctgtaggacatgtttccagaggttacgcattattcacacctagcaacaggcacaacatcgaggcctattctaaatgaagagaaatagctatcactcattatattatcacatatgttgagtccttaaatctttatcagtgaaaggggaccatgatgatgcctgtgggatgtgttttagttgcaagtataaatatgtaagtgacactaacaaagagacacctcacagctgagtctttgcaaggcagttatgggacacgataaacaaggaccacacaactatcttgactttactttaatgatgctggcttgcatttcaaaatggtcactatggctcttaataccacaggccagacaaaacaaccccagggaagaagcataacaggcagtgtgcttccttttatcagcaaatcgaaaacttttcagaaatgtttagcagattttttttacatttttaaaattgtgtgtgtgtgtgtgtgtgttctcatatgtgtgacatgtgtgtgcaggtaccctaatatgccagaagagggtgccaaaagcattggagctagagttatttgtgagccacacaatgttaagtactggaatacacacacacacacacacacacacacacacacacacacacccattgcatgcacacatattcagccacataaatccacataactatttgtacacagaaatatacaaacacacatacataaatacacacagaaacacaaataaataaaataaaaactttattaacaatttttaaatagtttcactaaattgccctagtgagtctggaacatgctatgtaaaccagactggccttgaactcacctcctctgcctcctgagtgctgggcaagaaattgaaaaatggcttttaggtaagcaactaaaggtatctactatgagagatcataataaagccacagactggatatggaaaatgtcatcacattaactgacatacaggaaatgttaagtaagcagaagacctggtttacttgatattgtatataaggcaagaagcaaatggaaaaactgaaatattttaagttgtttggggagttttgtttgtgtagtaagggattgaacccagggccttatgcatattgaggactctgtcccaaccataacacaaaatgagtttagctgggtttgcaaacacgagtgatagtgtggttgattcacataagagattcattatggttttgtttgtggaaaacataatttaaaatgcattgtgtgaaattatcaaagaattgaaaaaatattattttatgtacaattgcatcaatctctacaggaagagatgggaatttacctttagatattagttttgggtaaacacccaaatagatactgaggagataaaagcacacattatgtgccttgatcaatatgagacgttaagcagatcctcatggactgagatgtttaagcaacaaacagcttcctgtcacagttgtgggggatgggatgtcaagaccaagactgacaggtatctggtgagaatcctcctctggttacagtggccaactattggctgttctcaaatggtgaaaggaggactagaaagttccttggtgtctctgtgatggtggacacaaatcacagttatgagtgtgccacctttatgacataactacctcccaaagacccaccgtctaataccacttcacttgggggtgggtgggtttccacatatgcactactagacaagaattctatcccaccttaaggaccttttgtttaagatcttgaatttcgcctcagcttcccaaatgcctgagattacaaacctgttccatgatggctggcagagcagtacagtttgtcatatatccctggatgagtctgaatgcagtactacaggcagagttgggggtgtaagttctggggtaaaactattttgtttaatggtttctactctaatatcccccttgtcactccctattcatactctgtaactttgggaattagcttttccacatgactgtgtctatattttccagcaattcaagtcacatttataccacccccagcattataatcaagattaaatggaatgctgtcaattagctgtgtggcatgacacctgtcacacagaaacgccccatggatatgggaatgctgaatgtcattgctctgggggaaacatggcatcaccccaaagagccttgaaaacaagtacaaagaacacatacatttcctcagctccatgcagaaagccctcgaatggaaaagtccatctcaaagaacacggagtcatacgggtagtccgttaacacaagatgagaatgtgtcctgccactgaaatccaatgttaccgaggcaagtaaaatacacaggaaagacagacccagagaagtctccaggctgagttgacactaagcatcacaaaggagataaatgcagttttgtggtttattttttgagacctctggtatgatgggttgactacccccccccaggaaactaggcagacattatccagagaacttttcaatccaatctatgtgtgattaaatctttgttttcaaaaaggccctatttttggaattgttggtttagagtcccagcttttggtgttgtcaaaatgagctagatagagatacagggcaggatgtaactgagccagctaatggaagtcatgtgtggaagagaacgacgtgcaggtccgggggaataaaacacttgagaataatgatgtgatgcaaaatttgccttcgtgtgttggaatctggagaggttttatatcatcctttcttgaaaggaaattaaaccatagtaagctatggtctcctaaaatagtagccctggtcttgtttatttttaattaaattccatccagataagggcccccatcttctttgatatgagctttactgaccactactgatccatacctcagataaacaaaacaccttccaaattggatccatttgggaatgctacttttagaggtatgctttagtgctcagataacctgtaatatctttcggtaaggaatgagaaacccctgtttattttggtaagtgacatatcttctgagagtaaagttaccatgcagaggaacattcatttaatctcattctctccaaatcctagcgctcaggaaagcaaagcggcctcctgactgttgtcaactgaagggctctgtcactgctcactactctctaagcaaacagaaaaaaacaaatgcccatcttagccaccatggggatccctgttctcactcccattcacgtatccatccctccattcactcactccatgcaggacactgatagtgtgcagggcactgtccagcctgggaaacagttcatacctttgtaggagagggtcctgcatacatgactgtttggttagggaccactttgcaatggatgtcctatagagcaaatgacagcatgatctaaattatactatatctgggaagacatgagcaaacatttcctcactcccagatagagaaccaatgacagtatattcaggataccactgaagtccacaaggcgatccaatgagttctacaggacttacttacaggaacattggtgagaggttacttaccaaagcccacctcagcatagctgtccgctcataaaagctgcaacctggagtgtgatgcacaacttaaaggcagcttgagagctgaagactgtctctttcagatagccagctgagctgagcctcctcccagcagttcgataggtctctgctacacaacagcagagagttcccagaagcaaaaaaaaaaaaatgggagttcaaagccaactacacagatcctgtgtcttaagtctcctgagaattctcagtgtgcctctcaccctgttgagctcattgttgaatacaaagggaagggtgaatacagcagatgctgggtcagactttcaagcccaccgggtttctgttgatgagacatctaaggaaccaggggaacccagaggcccagggcactgctctcgagagtgcaggactcttaaggaacccaaaacatcaaaaagaggaaacactaaacacagggaaatgtgcaggactgggacactccaccacaccaggaagagaagaaagacattcaataccaaaatactgaaacagtacatacaggaggaaacagaaatcaggctgttgtcacctgctttgtaaatgctaattaccaagggagggatggcttcaaaagtctttcatgccctatttctcttgcctagaaacacactgaaaagggatggataaatatcacacaaaaagaaatcgcaattatcaccttcaggtgattcacagctgagtccatcctcaactaaggtctgtgttctcacaggaagctagatacttccatcactgtccctgaggacctgaggactatgcaaagcacctaaagtgatcatctttggaaaatgggaattcgtagtctcgaaagtctaattagatgattgcaatcaaccaaacaagatctctgtctccattgacttctgtactctctcctgcaagaattcttgaggcgtggaattccaccacacctggcaccaaccatgctgtcacagaagaaggcgagagcactctatccttccatttattctcggtgaagtgtgtgcacctcccatctcagtgccagcccccagaatagacctcggatcttccagggttgggttactcacttgtaaaaaaagaacatggcttcttccccacaaagctatgccatcggtataggtcatacttcccagaggcttgcacaggaactccacaatccagcaatggcatcagcccacctcaagagctttgattcaggattattttttaaaaagagattttattgctttgaaactgtttaaacacacagaaatcatggaagctgcaaaaggtctcacccctcctccatacagcctccatcactgtcaatgtccattctccttagagagcaagcgagccatctcttcctattggtgaacctgcatggtgacatcatcatctctacaacccgctctttacatttgagttcattcttgaggttctatatgttatagattcggacaaatcacacaaactatcatagcttcacacagagtagcttcccagactgaacaccctcctccttccacctactcaatggcttctccttctcagatctttattctgtcttcacaatattgacttttgcagaatgttcagtaattggaataatacagcccatccctcttacagattgtctgctttcgtgtaataatccacatttatgtttcctttcccaacacctttttctgcattgctatgtgattccttttaagctctggtaaatactcaattatcttgacataccccagtttacaaattcattcacctgtttggtagttgtgactgaagtagctataaatatctgtgtgcatacaaattttcaagtcatttggttgaataccaaagggtgtgattctaattgctggatcatgtagtaagactgtgtttagttttgtaagaaactgccaagccatcttgcaaccgttggaggattttaaaagcagcacacagtccagctggtctctgaccaactctcccaggcactctcctgtcagagcccctgacccagagagcagcaggacttatgagggtaaacagtggggcagctcccatgtgagtggccagcaggctaggtccagctattcataaatctgagagcattctagccttgccattatttcctcttcctcattattaggaagaaggcgaaggaacaaaaaggaaagcattccttactgataaacacaaagaaattctaaaaggaaatgtatgtaccatgagcctctcaaaacttattaaacaggagcaaggagtcttcattgctagtctttgtaatattcacctgctaagctggaagctgatataaaaccatgtgtatagaattggggtgtggtgtgtgtgtgtgtgtgtgtgtgtgtgtgtgtgtgtgtgtgtgtgtgtgagagagagagagagagagagagagagagagagagaggagagatttattagattggtttatatgctttgggttgagcagtcccaaaccagctgtctgctgatgcttagaatctgctagcctctccattcaagaggctggatgccttagcagtctcaggttagcaatgaaagcctgaaggattcctggagagctgctggtcctcagtacatgggggaagctgggttttgaggtcagaaaaggcctgtgccaggggaggcagcaatggagcagttgcactcaccagcagggaccaaaggcaggcaggcaaaaagcagccgttttcccctcaaacccttcttataaggggacagtctctagaaagtgctgcccactcctgggacactctcctctcagttaacacttctaggaaataccagtggaaagccacacagaagacttagtccctcattcaagttgacaggcaaggttaaccatcatgctacaagatccccttacttgaaagaagaagaaccaacagtcttcacttcttcttcaacctttgctgtctgcaggacaaagttcacatgggagtttatttcacagtgtaagataatcttcccttggaatgagaagacagtgggtgcaggcccctgagaatagatactgtgaactccaacaacagccaggcagaaggacacacagaagttacccactgtgctaacccttcattcctgacctcatgaaggctttagaaaaaaacttgttgaggctaaggaaattcagaatcacagtgttcaagatttaatttcaccaaatagaaggtttgaggcaacgctgccgcagaagccaagtttgtaatttaaatatttactttaataatttgcatcctgtttggattacatcttctacttttttcttaattatgagtaaaaataatagttgtgtttcaaggtcaaggccattctcagtttccatctgcccctaagctaatggtggaagctattgccaaaagtcggaaatctccacagccatttcccttcttaatgtaacctacgatgcaatccacaacagctaaatactgatgtttttgcaaatcccttgagtaattaacccactgcttatatttgttgttgttgtttgtctttttgctttgttaaactagtggcttgctttaaatttggtaatttttttgttaggggtgcatttgtccattgttaacagaatagttgactacctgaaaaataaatatcaacatgccaagcagaaaaaaaaatctatcttgggggaaaatataataattaggatcatttttttattgtgacttttttccctaactacaaaacttcattatactgggtttgggaatttatagtaccttctggaattggatttcatataaatagaagtataataatcttttaaataaccagagtaatctaaatctcttttgaatctttactttgtgtagcttaattcttttcatttaaaagcataccaagtatttctaaatgcactccactttaagcaagtacccctgggaaatctaaactggttgtgaaatttggacttttaaataaaaattcaagtgagaaagtaaacaatttacttggccacttgacatggccaataaaccagaaatgcttcccaatatgatctgaaattatttcacaacttggtgaacagggtgtaaccttttaataataattttaacataaggattaagatcaatttattaactctttgggacatctactcaacccaactatggagccataaaagttaaagtagaatgactggtaactgaattttcagatattcaatctggaaactgacagtgtttttcaggccaaagtcagtattcatactaaaagattacagaatgtaaatgaacaagataggaaccccacctgagaaccctggggctaagtatagtgccagctacagccacattcatagtcaattctaccacttgcaagtgttcagtgataccagtcaatctcctgacacttcaggcagatatcacacaaagcttttgagtatgtattttttaccattgcaaataatttgtcatcaaatagggcctgtaaaatggatgatataaaactctacagataagactcacacttggcttctaatcccaaagatgcatatttatcctagagaacaatgaaaactgtatagagctcatcctggagacttgtgggagctattgccaccaggtgtggcatgacaaatgggaaaggggaagaataagaagagagggagaccagcagaagaggaactgaggaacctaagaatgagttaatttcagacaacatggaaaaacttaaaagaatgattcaaaatgatagaagttaaacattttcttaaagataagaggactttgtaagttaacagatcgacaagcaagcaggtgttagaaacaatcactaatcactttagtttttagtgcaactccttcaccataaagatctgatcatgccatctcgggacagcagaggagtttatcccatagtcttttctaaggtggccactctgaactcttgcagaaagtctgcacaggttgatagacgttaacagtgattaacacattaactgcatctctgagatgtgcacatatcaatccttacccattgtgagcagtagcctccgagcctgggaaagaatttccattcccacagtctagagcaggaatcaggtgttctgcagaaggacaactcacacaggcctaggatttctgggacttttattgcaattgttgctggagcttctagggtgagaatctgggccctggaagtcttaagcagctaagctcagccactggccctcaatcagccagttaaggaggtgacatatgcaatagtacagcacagaaagttttatcaaatatggacacattgagaataggaaggaataaagatcagtgacttacattctccagactggcttctggatcctgttgtgaagtttagctatgcaggaggtctgtgtaactaagcagtcttggacaaggtatggccttgcccaccactaacccatcattgtctaggcttttgtgtctcctgtaaggagactatttctgctcattggctggcaccagggcccccaactctattttcctcttgtatgagattcctggggaaattctaatttctaggggtccagtgtttagaagttagacagtcttaaggaagggctgaagtatctctccctagaacaccttcactcctgcagggacagttacacagctgttgaactccaataagtctagctcaatgacagctgccaatcacgggtcagggaatgggcttggctgtgtcccagtaaaacttgaccttaaaatcaggcagcagattggtttagtctctaggtcatgaccagccacttcctggtctacagaactaagagccttgtctttccttcccaccagattctggtattaaaacaaatgccacggaaaaggatatcatagtatgacaggaactaagaaacagccctgccaatatcacctactccatatggaaattagtttgatggcgtctccccaccttgttttggtacagtaccaccatgcctcacttgacatgtttgctgagagttcatttccctccccctcttactgcctcaccacctgccctcacacaccctctcagagacacactccacactgcgaccttcagggcccaggcaagactgccttcttcataaagctccctgggtgtctttatttcctcctttacagactggatgtaatctcccagcgcccctggtcacatccaaataattaagcattgatttttttttgacggggggctctgggtagtttaatatcttctaagcttctaagatgggccaagggctcagcaaggaagctcaccaatgacctgtgttcatgtttgctttctgttgctgtgacaaatataatgaccaaaagcaacttgggggagaaagggtttctagaagagaaaattgggagaggtttgccatttagccaattataacttcattaattcatgtttgttttaagctggtttcacttttataggacccacacgtgattttacatcacaacatatttaatttccgcagtcccctttgttcaaagacctggtgccttcccttaaaaactaaaatttaaagtttattattggagtctagtgtagatggaggaggagctcatgcctagtcaaggaagagttactgggagctaatggctactcaagaggaagaatcggtttcttccaggatgtggctcctggaagctttcccatgatgcagtgggtggccctacaccattcacatacgggtaccactaactggacttgggatggaaagaactcatcagtaaatcttttaagaaagaaatggttcccccttctcacccgcagctcagtccctggggagtgccctactcccaggagagaccttccctactcggaaaaacaaaagctgtgtgactttatttttgctgtattgcagactttttaagaatagaaactgtcatcatcatcacatggcaacagtcacggagttattgaaagaagaagctgtaaaagatgacgctcattggctgtggccagtttctacgacccttacatatttgatgtcagttgccagagctttaccttttatattagggatgaagcattaaatctcagatagcctaactatcttacccaaggtaacagggccaggagcagcgctgtaaatgaactgtttctactctcccttttcctaattccactgcagtagtctgcatcctgtttcaaagtaattattagtttggggtgaataaatatagtcatcttcaagtcctctgatatgacctcattggtccaagaacttttctcattatccattgtcttatctgtaactatcctttgcattattgtggtcaatattgctgcttctaaatatatctacccctgtgtgaaaatgctgaactcaatgagaagactattttctttctttctttctttctttctttctttctttctttccttctttttttttcatcttaggtaacatcagttttgcagcatgggacccaagaaggagatctggagaatacacaaatccaaactccatgggctcttatttaagaatctcaggtggtctgctataagtttttgaattttgtaaatagcctctgtagaactgtccatgtggggacagccatccttcacgtataagttgttcattgcttcctggaatgcaaaaattctctattttcatgaaatttgttccacaactatcttacacaaaagttagaaattatttagctcaaccttcatctatcaactgacctctaaaacaacggctgtcttcagcaacctgtggtgctgatgcgagggtgattggaaaagatgctcacggccccaccctcagcctcattctttctcatgatactttccccatgggctgaaaaacagcattgcagttgttccttgtgagcatgagctcagagagttttcagtgtttttgttttttcatttatattgcactttaagtttgtagggggggaaaatagccagtttccatttaagaaatcccagcaaagtctatgacccagacagtctctaaacacaaactcccagtgaatgtccttgtaactggcccttaggcaggtaccaactataaaaggcaatgtccatgatgggcctgcctgggaacatgcttccaaagatttccagtccttcattttggtctgtccgctggaagtctcctggctccactctgaaagccctgaaaccataaagcagatctgagaataccccacagctgcatccatctgatgagagtcgtaactgattttccagagatagggaactcagcaaaagccaagctccatgatgtcaacagttctgggcctttactccttaaaacagtgggtttccgtgggagacttaatccatgtgttcttgatcaacttacagttatctcatcaaaatgccatttgcataagtgtttccaaaccttcaagaattgtcgtttctcagtccctccaatgagttctagcaagagtcagtcttgccaggcaaacactacatctaaaatctaaactgctttaaaaacccaaactttggaaatttcaagtagctacttcaactataacttaatatttacttccagtgataacatatcttgtcatcaaaaagattgtagaaagggattgttttacagctacactgaatcaatgggactaagtttttacatgtcttcctatttctatatttttccactgcaatctatgtggtccctgaccccgaggagattataatctaacaagaacattgaactagcatgcaaatcctcctttctaaaaatatttattcatttttattttatatgtatgagtgttttgcatgtatgtctgtacactatgggcatagaagcctaaagagaacatcagatgccctgggactaaagttttaatgtcagctgtcatgtaggtgcttggaattgaacctgtgccttctgaaagaacagcaggtgctcttgactgctgagctgttttcccagtctcagttggtggtggctccctcttctgttggattatctcatcagcttcatatttgactttcttagtgccgtcacccttattcatcttccaaattcatcttctcagactcatcttttaatcccatctcatctgggagtatactttctgcctccgttttgttgttgttgtttgtttgttttgtatttttatgtctctcctttaccttcttcagtcagacttcagcttgggtgttattaattaattacccaaagagtatatgactaacttgtctcaatcccagttatgaggaaaaactgaaccttactctgaaataaattcaagagactagcaaatgtaaatccattttcaatatccacttctgtggattaggatgtcaccctagagaaatggcaaaaatgactgccatatggatttattgtgagacggtgggttttactgtctccaatatcaagatgcctgccctcttcctcctagcctagcgcttgagaaagttagcatctttgagctcttctaagcgtagccgttatcccacacttcccagccctattgatacagaactcaacatcacacctaatgagcatcccaggctgaagattgccttattttgtaatcatggatgatctcagtcatttagcagacttcctgcagctttccaaccctgacagcgctgaggcaagaaggtgccagctaccagctggggagaagaagatcccagagcctcttgcttgtctgtgcttctctggtgaactttaagagaacctcatatacattcagagggcctacgtcagtcccatggaggctctgaactgttggctcagagtccatgagctcccatgagcccaggtcagccaggcctgtgggctccccacatcatcatctccctggctagtacaatccctcctccctttcttcagcaagattcccagagctagccccagtgcttggctgtggatctctgcatctgcttccatcagttactggatagagttatctctgatgacaatctgattacagtagatggctagttcaggtgctctctccaatattgcaagaaatcctctccttgtggattgctaggggtttccctgacaccagatttctccctaaccccaaaatgccccccttcaagaagttgttttttttgttactttcacccgccatcctgccttcagtcctcctcaacccccttcctgcatccagcctactcaatctgctccttcaagtttccaaccttccaactctccctctccacacccgccccctcccacagttcacccagaagattccctccattttcccttccatgaaaaattcatgcatctctctgtgggccctccttgttattcagcctctctggagctgtgggccttaggttctctatcctaaactatattcctaatgtccacttatgagtgagtatataccacgtttgtctttctgggtctgggttacctcacccagaatgatttttttctagttcatccagttgtgtggcttgatttctttgtggggctcccagcggtgggatcaggacctgcccctgacacttagctggatttggagagcctgttccctgctctggattaccttgcccagccttgaggcaagaggagggaggggatcttggtcctgccagcctcaacttgttgtgctatgctttgctcaagcccatgggaggtcctccccctttctaaatgaagatggaagaggagtagaaggagagggggatagatggcaggcagggacgggggatgactggaagaagagggagaggaaactgcagtctgtatgtaaaataaatgaaaaaaaaaaaagaaaacctccactgggcagtggtggcgcacgcctttaatcccagcacttgggagacagaggcaggtggatctctatgagttcgaggccagcctggtctacagagtgagttccaggacagcctccaaagccacagagaaaccctgtctcaaacgccccccaaaaaagagagagaacctcatactaaacatggggaataacttcaatgatgtatttattacacctacaaggctgaagacacagaaagaagtcactatcctaaccctgcattcaccttcaattccagatgagcaaaccctcatagaacacaactctacccccttgcagaggggagttatctacgtggacaaggttgtgccgagactacctcaaagaaccagaactgaagcagtgatctaccaatccacatcttgctcagggctgcttaattatacagaattcttgccctgcccatggccctccttctgttcatgtaaatttcatgtcagccttgttttcttttgacaggtcttactatagagctcaagttgctttgtagatgtatccattggaactggaatatataagtctgaattctgattggttgtgattttctgtaatggtctttgtccatcaaaaagagaaatttccttgatgtagagagtttactacacttatctgtggatataaggacaaacatttagaatgcagttaagtacaacctaacttggagattttccttcaaaattcacaacttaactagccccttggtagttggctacatttccaataccagcaagggacttggaatgtaccttgtcaagtgggtcttaagtccagttagagagttgttggttactgctaaggcatgcagccactactgcattggcacagccatctcctaggggaatagtgaaagtcatgaagccagcatagctgcttgacaaagtcccagcaacattgagccatggtttgaatcttcctgtgtttgttacactcttgggggctattaacataatgaatgattcacccatgtcttttccaagaaaaattgtttccgtatccactgataaagtcctgaacctactaccccctgctttcagagatgtaatcttggttgaccctacttgagagtcttctctgtgccttggagattgttatctgccctacacaaattcaagaacaaaatagttagaactgtatgaattcagaagaggctgactaggctcagtaggataggagaatcagcagccaatcagagcacagaattccttttacagtatacttagaatttcttagaaacaacctacaggatagagaaccatctatattaagcctctaaagaatcccgaagtgagagctagaatgactaggataacataacagcatgtataggtggtgtaagaatggtataggagaatacatgaagaggtattaggtatgaagatttgtcattcctaagaagattgatttacatcaggctgctgtggtgctaccaaatttagaaacaaaagaattcttttatttaaccaattttcataagattataaatacaaatattacaaagactgagtaacagctacaatggttcttcagcctgagaaaggcttaggctaatatgattgaccatcagaagttaagaaaaaaatacagtgctcaaagcatggtgattcacctggactgattaggatattatcttctttttgctctaaagacaatgattttgtaaatttattatgcaacaaatctcatacaccttaaaaattgttttaccatatattaagctactctaaatacttaccatctaaaatatttgataaaaagtgtaaccatttcaaacttgaagtctacttttttctctttttgagtataactgcatggcatgggagcatgctatcatctctatccattcaatttcatcaggatttgctactgacactttttttttttcaaatgtgaattgaattgctggataaatgcttgcaaacttttttttcctctttttttttctctttttttcaacatttcttatttgaattacaaacaggttgttttacatgacaatcccagttcccttctccctcctgtcctcccttacccccccaaataaaaccctccctatcacatatcctttttgctccccctggatggtgaggccttacataggatgtcacataggccttacatagggtgtatcctttgggatagggcctaggcccatccctgtgtgtcttggctcagggagtagtcctctatgtggaatgggctcccaaagtccacacctatgctagggataagtactgaactactacaggaattctacaggaggtcctgtagaattccaaggtttcctcacagaaacccatgttcctggggtctggatcagtcccatgctggtttcccagctatcagtctggggagcaagagttctccgatgttcaggtcagctgtttctgtgggtttcaccagcctggtctgggcccctttgcttttcactcctccttctctgcaactgaattccaattcagttcagtgattagttgtgggtgtctgcttctactttcaccagctgttggttgaaggctataagatggcatataagtcagtcaccaatctcatatcaggggagggcatttaagatagcctctcctctgttgcttagttggtgtcatctttgtagatctccacacctttccctagtgcctgatttctctggatattatcttaaacgccttgaaaccccaaactgctgccagcctgagaacaggctgctacagtaaggttgcttaagctgaaatgacccgtagaattttaggaatagggagacagtgttgacaataaaatatacccagaacaaaatgatcttacctgtatctcttgagataatcatgaatgtctttacaatctgttataaataaagacattttctgattgcttgtcagtcagatttgcaaagtctccccatctgggtgtctgactcaaccttcccctcacctgatccttacatcctctctggaacctgttcactgctggacctgaccctggctctgcatccttcgggttgtggtgccatgctagtcatggttgtggttcctaggcatcatagctgagtaggactgttgattgcttccctcctttggaagcacatatggaaccttctggtaccaatgttttcccccatatgaaagtggaactggggaaagactttaacagtgactggttcacatcagaatcatcgaaaggatggagcgaagggtagctggctcactgtaatgagttttgggctttctcatctgttgtcctagaggataggactgggaacaaatgcaaaattgacactgtagaagccatggaaacatagattgtgaatcaacacaaagtaagtgttttcaatgagaaaattattccaaagcaaacatgtctcccaaatgtctcccttcatgccctgctactgaagacactggggcaaggtctagacgttccctagtctgacccaactggctgagccagatgttcttcacagttcctatgaactttgaatctccatgacaacagccatggttctccatcagcctattgtcatgaggccctgctggggtggtactcccctccattgtcaatgtctgtctgttagctatccataactgtccatggaaactgaacttcaacaaatgattcctgaagcatgtctcctcttttacctatcctgggtaattagtttactaagcagtatatgttatagtacccaaagcccccacaagggagtcttagagacttccttggcttagagggtgtgatgtccactgcaagtccttactctggcattgacaagtgagttcttttactaatatctctagccctgtgtttctgacttgtttagcagcccaataatagtctctatctcagcagtggtattgaagattaataggtggaatacaagaaaatctatattaagcatagtgtctgcaagacagaagattcatgtccaatgcgacctgctatattctaccaataaaataaacaaattgctctgagctgctgtgattggaggagacagtatcattccaaggcattttctttcctagggctagctgtgttcatatcctaccctaatggtagggacatcacaggcagtgggtagccaatatgaggtaagctgaattgcaatcccctgctggcttttgaaatgcagattcatccatctctttgatgcctctaagccacatccagagaacatctctgagcatattatttgctttcttaacctcatcacttttcactgagttcaacattcctgtaggattcaaaggctcttggtacattcttccagatgaattcacaaggtaagtcaaaggaagggggggaaacatctttgaacaggacccagattccaactgggggagggaggaactgggggattttttgtgactcaaagggctgacagtaaattcagcctcaggatttccatgtgtgccagttgatgggtgagcaagcaaactactctgctcctttgtctgggtaggtatgaatgacggcttggggaactgcctttggggcagggaagaggacaaggctatcctagagagatcaagagccctcgttgctccttgcaaagtctgttgctatgtgatgatgtcccataataaggtacttttcctttaaaagtcgaccacttttaggaatgcatttgcaaactcataatcaaagctttagtcaatccagtttactgtgcactgattcttttggcctgccacatcttatggggcacttttcctcctcagaagcagattgttccaccagtgtgggcttattacttacaaaccagcagcgaggggcaacaaaaggctcaggagagctttctgaggtggatggaatctcacccatacctactccactatcactagaactgagagaccatgaaacacagtgcctaacctgctgaactaacacgctaaaagacacaccatttctatggagaaacaaagtgctcacagttcattctgaccagtctgtcctcctctccaaacattacatctctggtatattctatgtaattcttgagaccctcaatcaagaaaaagaactgggtctgttcaaggttgcttggataatggtgacctagatagaagatatcccacaacaatgaacttttcctgccttttcccaagactgtgctgacagcatgggtgtgtgcttctctatgggtctacagcttccccatgcacttagtagattaaagactcaaggatggaactggacctcactcaccgtgtgacccaagcaggacagaagtggatgtcaggtaccgaacattagcccactgaacaacgccaaatccttcgaaggaagattgccaaggcctttgcagctttctgcttgacctgacttgaggcagtgagagaatgaagaaagtacagtcacatgtgtatagaaaatctggtgtcagtgaggtctgtgagcactggaatggaaccacaccaactaccacaacaatccagaaccccagcgtggtgtttattttgtgcagcacagagggaaggtataacaagagaagctgatccgtagtccataaggttaagatatctttattcagataacaccagccaaacgcaagccagagccagggacagcaaggcaggcaggccagagagaaggagcccccatgtgtctgctgccccttaaaaacttatcaggcatcatcctgacctcacacctgtagccagcccttaggaggcgtggttacggtgtctccctatagggaggagtcagcacagaggggaggagtcagcacagaggggaggagtcagaacagaggggaagggtcagcacagagaggaggggtcagtacagaagggaggggtcagtacagaggggaggagtcagtacagaagggaggggtcaggagaggggaggagtcagtacaggggggaggagtcagcacagagaggaggggtcagcacagaggggaggagtcagcacagaggggaggagtcagcacagaggagaggagtcagcggtttgtagttggtctctgcaagggagcagtcttaggctgtaaacgctgaggaggaggaagctgcagttgctcactttcacacacactggtcagtcttcccattagctccaacgaaaggacagagaagagaacatgacttcctcagttttcacactgaaataaaggatttgtgtgaagctggaggagcggagaggattgagtgaagaattctttgaatcctcagattcgggtcaaaggcctgacctttgaaaacatatatttcaaacactgtttattcttgtaagactcataaaaggtttttggaacccttgagcttcactggataagcctaaccctcagacagtaagcagccacttaagcccttgagacagggcttggctccgatgccggtcaataagcaagaagcaaagagcattctcctcactgaggcagccctttgagtcccgatactagcttattttgtaggtaactgaagcttctgggcccagcactcagtccccctacctgaaaatgcctgctgcctctagagccctgtacttcttttggtccatatggtgaaatgacaggtcctatccccagtcagtcaaggtttaacttggcttgccagcttgcttctgcaacgcttggacctgttgacaatgagaagatctggagtctcccaggagactgggggagtgctgaccaacctcacaggcaaagggaggcctcctgagccatttctacagctattaagccctcagtggcatgtgggagagagacttcaccctgctgtttagaacataaatttcacacttttcattcttttacatcagaaggttaatcccctggtaacactgtgaaatgctttcatgcttctcctggcctgcctagcacgaaagagcctcctactccagccttgcttctttttgttcctggactcccccagaccacggcaccttttaaactcacttgtgacccaccctggcttatcctactctgtactcctcaccaagtcctcctccatttggcccacccacccagaaaacttgagcccatacaagatgggccgtggccagctgctctgtgggaactctgtgaccttcaggaatccagattcctcttctttcatatccatgagcctttgcacacctgcccctgcacaccagaacacaggtagcatgggcgtggtttatcggtccactgtgtcacattctctttgaagaacaatcacagaggctcaacaccacttcctggaggaggcactccactacagcctctgtctcctctatgatatgtaacccagactggctagctctcagcattcctggtattccatgccctgtggaagaaagtcagtcctctagcatttattggctctcctacttgtgaacaggactttttgaggaaatgagcaacacttgtttcttttttaagcttcatggcagtcataccataaaggtcagtagagtgtggacagtcctaggctaggggttagtgggtaaataccaatgtaatgactcgatgtgagaaggactagcagggtgagcctttctaggtgtgtgctgttggagcaaaatccttactgtgggagaggaacatctactgtggcctaagaccttgtggagctaccccattatctgagtacatgccttgcggattctggaacgttctatttcaaagcctcattgattggcttcgaggaagcttgtagcatacaagttggactaattagtttttaccactgtaacttcccggagtagttctaacatcttgttccagacattacaactgattattgataacagactgaagtagttaccagcaggtgcccagtcacaggaccagaagccatttgagacagaaagccaacatgcagagacaatcagaggcaagaggagggaacagcgagtgctaatggcagcacaggagcctccagcttctcctacaaacagggtctgcctgtgggtggtcagctccctagccaggacttccctgctttcattacattaagctaactaactatgagtcatgggtagttttccttatagttgttgaggatcaggtaaaaggaacttgggtaaaggagaaaggggctctcagatctgtttttatctcatcttgtgcttttgatcttcaatgactatgaagtattctcatttgtaagccaggaaatccaaccatgattaagtacaaaagaagtgcattcaattggtactagaaagaagagtcaaatggtctctttcagcaagtaggtgactttggaaaaggcaacataatggagaggaaagccactgcaaaggaaacaagagattaattaaggggaatttataaagtctttatacaaaagtcaatagctgtccttggttgacaagaaggtcacttagatatggaagaaaagaagattccatttgtgaaaatgaaaccgtgagagagaaatgaagaatagaatttagaaagaatgctaggactgttatttctttaagcagactttaatgtttaaaaggtggaattctgagtttgttatagacgagcaggtgggggagagataagatgtggaaatgagttgggtctggagggtggaaatggtgtggatgggatgatgtgaaatggactggtatataggacgtgcttcctgctccaagctggaagtgtggggttgttaggtttgcgtggaaaggttgggtatgatgtaggagagtcttgtggtatggcagataggaagtggggatactggaccaagcccagaactcctctacagggaaggagggaagactagatgaggctggttggtggctgtggaacccatgctaaatctggtagatagcagaaaaggtgtgtaggaggtcaggggttctcatcaggctacatcctggaggacttggagagtctgggtgtggagaggaggggaagaggtgtcccacagggtcctgtgggtggatgcaggtagtgagggcccttcccaggtgatccccaggaccgtctaccaaaggaaggaaagggagaaagggtactactgatggatcgtcagaaaaacaagtcacttatcatgcaaacatgagggcctgagctcagacacccaggatacgcttacatcatacacagtagcagccatccacaatcccactgctgctctggtgagatagaaaaatccgtggaaactggcacttgctaaaaggaacaacaaagagagcctgcctcaaacaaggtagaaggcaaggaccacaggcacccaaggttagcctcagactgagacacacacacacacacacacacacacaccataaacacacacacacacacacacacacacacacacaccacacacacacacacacacacacagaaagagagagaaggagagagagagagagagagagagagagagagagagagagaagagagaggcacacatacacagacatagacacacacacagagagacataaacagagagacacagacacacacatgcctacaccatgcacacaagcttttaaaaaaccatagaggaaatgagacaaggtctcagatttgtttgaagtaacttgggtggcagtagtaggtcctgttgcagattgtccctatgaataactacatgagaggaaacagccagggactggttatgtgtttgcagatgctggctaccaacaatctagctcttttggacaaaggtactacataagatccaatcttcacaaaagtcaaaatgaggtctcagacaaagttcttaataagaacactccacagcaaccactggggaaaaggtgtaggggaggaggacagaaaaagagagatttttgccacctgcttcctctcaggctgctgggtagcaaggacttttcttactgaagattttgccatagtccaactggacacaagtaaataaatgttttgcagatgaactggattgaattagatctactttgccatggatctccttacaaacctggttacaggggaaggtgtgaacatagatttgttccatttggacagtgatagactgctactctttgcagcaccatatctgcagccagacatcaatatttggaaacatccatccatctcagcctcagacgtcacagtgaagaagccccgcttctgccaagtctcccacttttctcagtgtggccaggatgctcaatgtcaaaaaaacaaaaacaaaataatggacagtctgtttcttcaactcagtagggctaaaggcagagcttctcaggaaagggtccctgaactaccaggatgtacctcagcttcaggcggcccttggcctagctgtagactaggctgactcattgtgaattcactcaagcagggatagatgactcttttctttctgtctgtccattcattcagagggtgggtctctgtgtcataaaggtgaccacagctgtgcccatctctcctactgagtcctgtatggtaattttagaaggaccctgagatgtctaacctcatgactagaagagagctttgtgacagatgaattttatcactcaactttaaagagtgactcactccagaatgagcaatttgtaggtcagaaatcctacatccttgtcatttgcttcttttaggcaggaatttaaggaactcagcactgaccagctttaaaattatttctccagtcagtaggaaagtctgcttctcagcctctgggaggaatggtcaaataatgctgtcaaaattccccagaaatctgtgttgaaaaaatcatacaaacagaaaatttaactactaaataatcaggactatttgtgagacagtatttttttcttctaattttccctgtcttgtgcattttacaatcaccttcaaaagtctaatatgtgtgtgtatgtgtatgtatgtgcatgtgtgtaatgtgtgtatgggtatatagatatgtatgtgtgtgcatgtgtgtgtatgtatatgtgtgtatgtttatatgtgtgtattgtgtgtatgtgtgaatatgctcatatgtgtatgtgtctattgtatatttgtgtgtgtgctatcgaaaattgggtgttcatgggtgagcggatctatgcctgtgtcttgagttcaataacattgatctacctttctgctttaatgccaataccatgcagggtttattcctatagctctgtagtagaacttgaaatgagggtcccatactggatctccttgcccaaccttcatacatggggaggtgcttagtcttactgcaacttgatatgccatgttttgttgatactcatgggagatctgccctttcctaaacagaaatggaggaggggtagattaggaaatagagcagggatgaggggagggactgggaagagaggagagaaaggaaattgtagccagggtgcaaaataaatacataaatttattttaaaatgttaacagtgttagtaatattaaacatacctgtctgattttttgcagattaatataccctaagtcatattaataattcttaattattattaataattaataattgcaatgggtacaataaagcacaattatttgttaccccttcatgccctttctatagatgtgatctgctttgcacacatatgcttaagcacaagcttaagaattaaaagagcaaatggacatggctcagtcaataaaatgctagccatgaggacctgagtctgggtccttagcacctgtgtaaacactgtctgcagcatagacctgctatcctagtgctggagagctggaggcagaaagaccacggactctctgtccagtcaatccagccaatttgtgggcttcagagtcagtgagggagacatctcaaaagagtaagtggagtcaattgagaaagacagctgacaacgattcctggtttccacgtgcacacatacacacattcacctgaacacacacacacacacacacacactgctccttagacaccgcagcactcagtataatgttgtccacatctagcacactgacctgcactgcgttgttttgtaaataggaatgcctggatattaaaaatccacatagcaaccatgttccctgctttgccctagcttctcatttcttccatgtgcccagatagacaagggttgggttacatgtctgatacataattggcaagcctcagtctttctccagccaccaaaaacattaacctcatcccctttgtcccaccaatcacagaagcattcttgaatcaaccccacccttgttcaacacagaagggaaaaatacaagcaaatactgtttgaaactcttcctctaatgaggtcttctgtttgaaaattctttgaatatgtctctgttgtcatctccctagctgtggcttttgatctcctgaaggggaaagctgacgcctcacccaactaagccactgtactcacaggtcctttaactatctcttctagatactacgtgacaaactgccctctgattggcaaagcagacacgatgtagtgcaaggcgagagcagagaggttttgatgatgacagactaagcctcacggagtatcggatctgtccacgtgcttcccacttcccaacaaccggaaccacaaaactggtagaaaccagtatagatgaatctcccttcttgggtttttgttttgttttgttttgttttttttagctgtgatttagtagtgggtaaactaaattttgctcacccaaagcaaatgagtttgtaaagtatctaacaggaacagggttcttacacattcacagctggtattttggactactacctgaagaaaaattgaattatgcaaatggagtacaagaaggacttcgtcatgcccttccactggaagtgattctcctgactcatgccccactttatttttgatccttgggaaaacctttctctatattgtgagtcttaaaattttaataacaattttccatctggaaccattagttgatctttccacaaaattgggttgctggacaaggtggagaaggaagagaatattcctggagcaaatgagaccagagtgagtggagtcctcagattcgatgggcatcattcagctcatagacagtcaaaggggtgaaagggttgtttttcttgctcttccaaatttatgtacatttaaattgggggaaaatgaagacaaccaacatctttacagcctgtacaacacagggccacagccttctgctaagttatctattggtaggaggctcttggctcatggcccagactctgtgacaaaatcaattcaccccctaacgcacacctacaatccaccttcaaggaagcatggcttgggccactatgtccatcatggtggctttcaaaagtactgtgatgctgttgcctcagctgaaggattttgtggcctgattccccaacgacaactgagtctggggcccagctgaagtcattctcttttaaggtcttctctctcaggcagagaggttgagcgtccatcatgggccctaggaccctgaggtttccatggggtgctgtgtgtttattgcctctcaagttaccaggggaccgatgggggaaaaacttctaggccctcattcatgaccagtgccaccacactgggggaggtagactgccacaggccagagctgccacccagctgattcaaccgccactcagactgtcctcagaggttactggctggagacttgaagttacaggaaaccttccggcctctactggttatttatagaggcgtttataggatccttccacaacttgagggaggaaaatccaacaaatgtcacctcctattatcacggcctctgagttctactctgaaaatagaaattggaaccttcccccattaaccagtcaactggtccagtagtacatttatattttaacaatactattaggtgttcatcctgtttaattctttcagattttacctcctggagaattttccctgattaggcccaccttcggctgtacccttgaatacctttctaatctgaactaacaatttaggaatggtgctgagtgtcgactcatctcttcacagttctttctcttttctttattatcgcttaccctgctgtatgtctcacaagtacacatattaaacttgctacgttccagggacatcctgatttttttaattctgactgcaccccaaggtgaatgtgccattcttggttccattttaaagatgagaagacaagatttttggtaagccaccaatgatgtccatgcatggcttactttctttgtaccctcctttttgttcactttgtgaataataaaagccatgcccaatccaagaatcacatagatagacatatatatatatatatatatatatatatatatatatatatatatattcctgttgtgtgacccatgcgtgctgaatttgttcttttccttatggtcctttatgtgaatacatgaacacctgtaaccacagctgtcactatgtcactttagcaggctctgtatgttactaaaaacatcatgtagtattgggctgagaatttcctgtcactcagaatcatgttattgtgtgtagctataattaatttcatagctgtaatatatccctgcacgtacaattctcatctattttcctgttgagaggtacatgcttacctgccactgttaataaagtgccactatgaacattgtttgcctgttcctatgtgtgcatgcgcacgtgtgtgggtgtatggttagaggccagaagacaatacctgatgtcattccgaaggagatgttcatcttgtttattgagttctcactggcctgcaacttgccaagtaggccaggctggctggccagcaagccccagggatttgcttgtctctgagtccccagtgccaggattacaggcacatgccaccacgcaggctttttaaatgtgggttctggagattatgcttgcaaggttagcactccactgccttacctgtctccctggtgcctgatatgggcatctttaagtgtacctctgagtacaccaaattaagagtttctttttatgggtgcacctagaaaactgtcaagttacagggatgttatttaaagatcatgtcaagttgtttctcatgtgatttaccagtttgtatcagcgatatatgagaactcttgcacgcaaatgctcttggtttgggtgtagtttatacttttaactcttgtcaagaaattgaatataaaatgaaatacaagtgttgccgactgctggtatatgttcctgtgaggctggatatccatatgagtgtgtggggctctctaaatgccatctatctatctatctatctatctatctatctatctatctatctatctatccatccatctatctatcatctatcatctatctgcctatcatctatccatctatgtatatttttatgtatctagctatcatagacctatcatccatccatctatctatctgtcatttatttgtatggatcttacctatcatagacctatcatccatctatctatctctccctcccccacctccctttctctccctttttccaagctatgtaatcttttctcagaagttttttgttttttgttttttgtttttttgttttgttttgttttgttttggttttggtttttcgagacagggtttctctatggctttggagactgtcccttttctcagaattttataggactcttcacatactcttggtagtaaacttttgtcagttttatattacagatgacattttttaccttctttgagaattcttcttatatatagaatttcttagctttaacaaagtcaaaatcacagctcttttctttcatggtttgtacattttgtgcctgtttaacaaacccatccctacccaacctcggaaagatatccacctatattttcctcctaagtgttttaaagtttgcttctgacatttaagtccctgatacatctggagttgattttgggtatggtgtaagggtgggatccagattcatttttttccaaatagacaagcaattttccagctccttttattgaataatcccacttttctccactgaaatgcaggctacctctgccctcattaaagctccacataggcaagaggctgtttctagaatattctgctctcctagttctttgatctacacctgcagtgtcaggcttttagtaaccacacaatagttacaagcagagaatttatcatgtataaccaggggaattggagcacgtcacctgaccatcttgttcaattttctatgtaacacatggtaacgataaactcccttacaagggagccataaacattaaggggatatctgtgaagatgtttgttaagaagcctgtgaaacttgagcaaatcctctgtagtgttacttgtttgataaatgttctcagtgtatgtgtttgttttattttagaagcctttcagttgttaggaatgcaagcctgacttgggctggcttttaaaataatgtttaatggcccaagtaacttaaacatgccatggtagagcctgccatatgaggctttaaagtagtctctctctctgaagactaggggggaaaaagcactttcctgtctctcctctcaggctctacaggtcttctgatgccaacgaggctgtcagcatagtcagtgcgtccccatcactctcagcctggacataggttcttcaaatgcatccagagaagaggcaggaagcatcttacctggatgtgtgggtcaacgttctctgtctaatggacctcatttaggacacctgcttggtctccatccattggatgacctaagggtggtctgaagtactggagctgtgagcagaggtctgaagaacctagttcctgttcataaagaagcagagagtaagcacttcaaggagacactcagagcaagaagctattccattttaggacatttaaacaaaatcacatatttataaaggtcacatgttatatactgtcgagagcatacagtaggcatggcaacagctctcatatacccagccactcctagaaggatcctctcttagccctgtttgtactggggtctctaatgagtgtcttcctgcatctagatcttgttatgtctaagaagccagcttcctagtagtgccttgatgtagccagcgcctttgtccttcactgtccttacttgtcattgattgagttccaacagggaggctattatttgaaaatatttttgttgtttactattctggttttaaaaactatactcactttacccaactatttttatcatttattcaatcattcactcacgtatgtaactgcatatacttttattcactagcattagggtttgaaactgaagatttgcacaaacttggtaagtggtctaccactgagctacaacccagtaccatctttgttttcttaattaatatcgaaaaacataaagcttgcacataccaatggaccactgtatgatgttttaatgtatgtgtgcattgtctgatttttcaatggagttaagcatgtctgctcaaatctctatcatttcttcacagtgaaaatattcaacacacctctacaacgttaaggtacaaagtgtgtaattgccccacctgtatagacctttcagccttcttctttgaagagtttagttgccttctcctccttctctaccctctcctcttctcaccccattgagttttgaagtgtcagtgttgggaatgtttacattctccccttcatctttaagtaggattttcttgctctctacatgtgattagttctgttcctggaaacctgttctctctgaatggaagctttgtgcagctggagagatgtgtcctctcctgtaatcccagcactactaggaatagaccccgcactactgactcacaggacagtggtccctgcacagagggtaaaaagaatccagttattgcatgttgacatctgggtctctcatttattatttgtgtcatgaccttctgtagacttcgcttttcatgggcgttttagtcagcctagctttcccttttcattgatggcttccctcacatgcaattctttttgtttgtttgtttgtttgtttccctcaagaaacatccttccttgttgtgttgttcttctcctctgatgaaaatactctttctcagggtctcctttatggagttgtatgtggctccttgactctgtgttggatccactgattccagaatcctgtcttccatccttgttgcttcatcatcttcaactgaaaccggagtaaaggtaaactgccccttcttctgctggcacatattcgtgtgtgtgtgtgtgtgtgtgtgtgtgtgtgtgtgtgtgtgtgtctagtgactcacagctttgctttttttctttctactttatttgcttcttgacttgctttttgccttgctttgttttgtcttgtcgtgtttttgtagtgtctcattgccaaggctcaatccaggtgcctacattcttgacacaggctctgtcactgagctgcatcccacccagcactgcacaaattaagaaatttagaggagccttgtacattttctagtaacataccattacttataagcacattttgtgaagatttctttatcttaagtactccataacatcattaggaggttttattattgattttttaaaatttatcttgtttaataataaaagaaaatctttggtttgaatattttcaaaactccttgatgacatcatagaaaataattccctctcctactttctccatccacattttttcataaaaaatatgatatacactattatttcaaaatgaatgaatacatgttttcaaatttcataactacagtttctaacatactaaatataggttggaataatatgtatataccatgcaaaacacaatggcacctttagttgagtttggttccagattaaatgactttcaggttttcttctattttgttgctatttttagcacatctgagtgtgtacacattcacgtaactgtcacagattgaagtaaggactgcttctcagatgtcaactgctcacacctcaaggtaatataaagaagtttgcccttaccttctgcaacaaacctttctgtagacagggccacacggtttgtgctctttcacttgtttggcaatgttttcctcaacctaatgtctgaggatatgatttataccatcagccttcaatattcttaaaacttctatacaatattttatattccacaacttctttttgagatcttctgttgatagacacatgggctgtttccatgtgaagttattcaaaggtgaaaattgtgatcgttcttgtgtctgtttgatggacacgcctactgatttgttttcagtatgcctaaatggaattgctgagtcaccatacttaaatttataagaaactatcacttttccctcatgttgtctgcaccactgtgtgatcctcctgtgtgagaaacccagcctcactagaatgtgtttctgtcagccattccagtgggtataattacagctttaattttcgtatttctgatgagccatttttcacacatgtgtgaagctgtggataacctcttttagaaaacatattctacagagctttgcgcattgcaaattgaatcacctatatttctccattatattttaggcatggttaaatgaaaggagtgattttcattgcattctgtggcttgcttttccctctcttaaggcaaaatttttttatatacaaatgtttcatgttgtcagatgtccaagttctgaatctttcatttgaaattaatgcgtatagaaaaattggggggaccaaccatgtagtttagtgttagggtatgtgactagtttgtttgtggtctcagaaggttcaatccatggtgccatcaaaataaataataaataaatatttgaaaacagagaaatctttccatacatttgcttctgaatatattcattgatttttttaatcttacagttttgttttttaatctttcacatttaggcctaacatctataggaaattgatttcttgtgagctcatggaaggttgcaaaggctcatattagtatccagttacatcagcgtctttcatcgaaaagctcaccccatccaatgaaatccatcaccagctttgtggtaagccttcttactgtatatgtgggcagctttctctgggctctacttttctccttgttttgtttgtctggtaccaattccacatgtctttaatagcagtttttattgtgagtcttaaaatctggtggagagttgggcatggtgacactcccaacagtcagaagactaagacaggatgctcaagcgttcaaagacagcctggattgcataaaaagttagaagctacctgggctacatagtgagatctgtttttaaaggtggtggggatagggaggggtcaaggatatggtggctaagaaggtaaaagtgattgctgcacaaggctgatgacctgaatcccatctctggaacccatgcacaaagcctgatgtggtgttctttcttattctctgatccaataataataataataataataataataataataacttacactttatttatatgttaaatgcaatttgaaattactcaaattagattcttttattttcataatgattttgtttttttaactttcttgcctatatcctctacaaatgtgctttctcctttcttaaaaaaaaacacaccttgctcttttatgcctctttttgcatatacttagcaatgcctacttatcaatatatatttaagaaacaactgcttacccaaggaatctcctttgttgtgtggcttgttgccttcaatctcttcctatacaagaatctgactgccagcaagacacagcaggtatatacccaaaggagggacagtcacaccacaatgacatttgctcaactatgctcatagcaacattatgtgtaatagccagatcttgaaacaacctagatgcccctcaactgaagaattgataaagaaaatgtggtatattgttgggtgggggagggcaagcctttaatcccagcactcatgaggcagaggcaggtggatctctgtgagttccagaccagcctggtctacaagagctagtgccaggacagcctccaaagtcacagagaaaccctgtccaaaaagcaaaaggaaaaaagaaaaagaaaaagaaaatgtggtatatttacaaaatggagtactactcagtggtaagaaacaatggcatcctacaatttgaaggcaaatggacagaactagaaaaaatccatcctaagtgaggtaacccaaaaccagaaagacaaatacagtattactcactcataagtggataccagacataaagcaaatgatacccagcctacaatccataaccttggagaagcttgaaccctcttccagaaacagatggaactaatgcagaaatccacagctaaccaatgggccaagctcttggagtacaattgaagtgagtgaggtacggtaatattaaccagggagtcaagaccatgatggggaaacccacagaatcagctgacccgagctagtgagagatcactgtctccagtctgacaaatggggaatatgcataagatcaaactagactcccttaatataggtgactggggcagtatatgaggccactggcagtgggtccaagatctaacactaatgcacaaactgacttagtggagcccattctatatggagagataccttgcccagcctagggtgtggggttagagaggtgccttggtcctgcttcagtgagatgatgggacagacttagcagaattcctagaggaggccttaccccctctgaggagcagatgggaggagggggagcaggaggtgaagagggagggggaactgggattggaatgtaaaaaataaattaacaaaacaatctgacttaaatgctacaaagttaaaatcagataggccataaaaacaaataatatgtttgtatgtttgtgtttttttatgtgcatcttgtgctgtaaagactaaaaaaacataaatgctttgggaaaaatctaaaagttttttgagttttctgtggtgtctagtctcaggggtgatgcttacataggcttaaatcatagggcataggaaggagtcattggaagcataggaaaaagtagaaagcatgtattttaaaaagagttttgactgagcaaagagaataatttggggtgatatttctctaaagttcccatattcttccatgccattttcggacatgaaagtacttaatttggagaatgagatgcccaaggaaaggtcatcaaaaaccatgaacctgagatgaaagatttacccaaactaaagtctagaaaacacagtggccagttccaacaatggcctgctagatccctgtggtgccttaccccacaatgtgaaaatgtgagcttgcagtattgacataaatgctctaagaaaaaacctctcagacatcaaagagactctgagttctgtttaccacgttgactttgctaggggcatttcgtgagtattattcagtaagtgttgaaataagcatggttttctgactaaccagcaatttagcagaacattaagcaaaagcaaatgtactaatcctttcagattctgtataattacagtcttcccagtgtctcatgctcacctccctaggaatactattatttttgacattgtttttgtctaggtattaaatcaccaaaatacaacccagtgatagaggttaaagtaggaaacctaaatgccttggtgtaccttaaacaacactacaaagtctgactctgtgggaacctgggagggtatacgtcttagtgtcctgagttcacagagttgtgttggcccaatgggtacatttcccagtccattatccttcacaattcaaatatcctttagttctaattaatttacccaaagcactggtaacactcttagatatccctgttccattcaaaatcctaatttatgagcagaaattttcaggacaacatagagaacaaaagaacacatgatctgcctctgagaacattgccttctggaagcaaagactggctgtaatcagagtgaggcatgtaaaagcacatggctgagtcgcagtgggccctcacacagaatgaaatgcaaacagtggtaaagtacacactattgaaacagaaaatagtcaagaatttgaactatgtacaatttttttattcagatacaatgagggccccagcttgagactaaaggagattcagatgagggacatctggcaaaagggcagtgtcagcccctagatttgtttgcatgaagactgagtatatttctggagaatgtttgttcctcatacaaagaggatccagtaatgatgaggctgactcagtcaaggagccttagtcatgggattaaaaaagatcactctgaacacagccagggtgaggcttatgcccagcttcacccacgcttagttgggtactatgagttctaagtaaatgctaaaataattcttctacttcgtggaatagcagctctgttttgggctcctactagcagaattgttcagaaaaatagtggtacacactcagacgttgtgtattcaggataacaccagggaccaagcactggctctgtggttacaatgccttggtcctgttttgaggatagtcaaccaggaacaaatgccacacctactgaacagcaaagaatgcaggtctcagcattgaaataaagggaccccacagaaggctgttatacccagctcaacattagcagataccagtaggaaccttcaaaccagcagagtaatgagccagattgccaaatctgcataatgggtatgtaggggtcatgtgtagtagagcatcaatcacattgagatgtaaaaagttctggttgtaaaaattattggttgctatattacaatgaagggtggcatttcatattagcaagggctttcaacataagacagcacgagatactgactggggaatgtttaatgccagcagaaaccagggagggagttgcaaggagagctcaagaagggaagacagctcagtggctaaagtgtgtgctgcacaagcaacctaagtaaagccctgggtagccacacacagtgaggtaagttgagaagtggaaacaggagaccctcagaaacttgcaggccagatagcctgacatttgcagtataaacaagagactctctgacaaacacctatatctgagcttgtcttctgacctccataaatacacacacacacacacacacacacacacacacacacacagagagagagagagagagagagagagagagagagagagagagagagatttaaaaagatatcttaagatgcctgcttattcaattagttctcagttttaatataaaagaaatcttcagatgtatctttttatattaggtttataataaagccaaaatgatctcagtgtgtgaaatagtgcctaattgtcccatgatcctacatattttttctgtaggaaccccagagaatcatagggctggggtagttcaatggcagaaatcaagtctgccaattcaatggtgattcaaatagaaaaccagtcagcaaaggaagccagccattgactggcagttcaactggcagtggagttcacatcctctgacctccagttctgtattttgataaatacccccgaggactcagagaaatcatttacaaaataataaacctaaccgtgtctcagagagtatcagcaaattaatttatctgtagctattccacacaaatataaatgaagcttggaattcgtgcacgaaacatgaaaatacccttaagcatttttttaatcattgttgattgtgttgttgttgtttgagacaggatgttattggttcatgctgtccttcatcttcctacttagccaaggatgaccttgaactcctgaactttctgcttctatgcctggcgtcctgggataataggcatgcgaccatgcccaacacacacacataagtctgttagtttaggaatgtcagttcttgaatttatttttaatacaacctcttaaaaattagaagcagcattagaattaaattcataacagaaaagtttgcacaatcttttgtttttctcctaggaatagatgaggaaaacatggcgggaaatggcaaaagaaggcatgcaaacagaaacaggggcaagagtgaggaagaaaaatgggggagggaggagcggagagcgccaaatgaaatgtttgagtctccacatgaatccagtaggtggccagaattccaccaagtgaagactgaacttgaagcccatcaattttaaccaatgtgacagagcaaaacaggaaaccatagggagacattgtatttgtcaagttatctgtttgccagtgtcttcactgccctgtctactgcttttgtttgtcagtctaaccagtttgtgtccttgaccactcagcacaagacggtgagttttatatgtccacataggctctctgttgaatcccagactcagaagtcaatcactgttcctgagaaccccagaactcaactttcctcttaatctaaattagaatggggcggcctgtgtttatgctttaattaagtagaaccatatgcgtgcaaccttttctctgggggctgtgtggagaggtactgcatagacccttcaccgtcttgactacatggctgttgtgctcattgagaaactagttgtcttggcttcttcctcaggagttcaatgatctgccctggatcccgtttctaaagaaggaaagaagggaaattcagagaggaaagaaaggagaaagggaggggaggaaggaaaagatgaaagtctatatgtgtgcacatatgaacatgttcatgtgtgtgaatatggtgtgcagcagtcaaaagtcaatcccaggcattggcccttactctcaccttatttgaagcaaggtctctcatttgctagctgttgtacacaccaggctcactgacccacaggcctttagggagtcccctgtctgtctcccatatcgacataggaacgccaatgcaggaatacactgttgtgtctagcttctacctgggacctggggattcaaactcagtctttgaatttgcagggtgaatcttttacatgctgaaccctgtcctcaaagcttttagtggctgtactgaggattggaccttggctatcatgcatgctaggtaagtactctgctactatgctacatccctaccaaaacgcaagtgttgccagagtttctcatgtgatgcctgacaccttctcaaaaaagaaaatctaggaaattctctttcatttgtcctggttggtgggagggtccatatttctgggaactctatggtcattattatatgtaataatcaacctggaaatttgcttatgaatgtcttcctttatctcacaggcccctctcccttctacaactctttgatgttctttgagccccgggacagatggcattgtcgtcagaacacctcctcaatttctcctacccactgggaagcccatacccagtgaattcattcataccttactcccctgtatccccaccacctgacttctgcattcttttatggagctcatgtagatggccgccacacttgcaataccaccctgatgatagaaattgccaactatcatccaatttcttttctaaatgattctttatttttaaaaatgtatgtgtgagtgcctgcgtggctctatatgcaccatgtgtgtgcagttgcccatgtggtcaaaagagggcatcaggttccctggaactggaattgcaggcagttgtgagtcactgatgtgggcgctgggaactgaacccaggtcctctgcaaaagcagtaagttctcttaactgctgagccaaccctgtagtcccatcatctaatttctaacagcgtagtgaatattaaattaaattgaagaggcagaaagacagcaggggagcctgaagaagagagagcagatagggggaggtttctagtaactgagagcaacatagaaaacaaaagataatttgggcattgccatggagggtgacaggaaatgctagtggaaagacagagtggtggtcaatagaagcaagggggcaaaggcagaacaggaagttatcagagatcagtgatgctctgtaatgtaattatggtgtcaccaaagtgggtacctttggtggaatctgtctctttgttgggtgaggaaggggagataatgataccaccatcccaagggtacctcttcccacatccccccaagtttccacatttctgcagtatctgagtagatttgcctccatctgcctcacaaagctcgaagtctgtttgccccagagctctagcacaagggcctggatgaaattctctggctctgcttcttctgtgaagtttgaataagacataattattcttccatttaaatacatgctcagcataatctgtgcccttcttttcatctagatgttataaaacgaccaaggctccaggaagaaaggagcctttgctctcagcctgcctttcatttatgataaactgccagattccttacggcaatgcaaaaaggatgtcagatcctcaataatggggggtggggggtgctgtgtggaaacaactgttgacagagaaagcagcaacaggccaatccctaagggagagacattccctaggaatggcccagaacagcatggcccaggacatgaccctgcagggctagcgggaggcagaagtctcaggctaagggctggtctgcttggtactaccttggcagtctctcttccagcctcactgtcttgcccaccgccagcttcacttgttgcccatgtaggaaccacggagcagtgtgtcaggctggggaggaactggggaaatccagattctattatttgggggtggggagcatttcaaactgttctccatatatcatctcatttgatcctaccaacagtaaccaggagaaagctaaagctgattgtattacctcctggattcctgcgcagttaaagaaacctggggctatgaatcctgggaattgtcttagtttacactgctgataggagtacagcccaaccttctacctccagggacagcattggctttccctccattttcctgttctttttgtttcacccagcatggtctattaggagactagaaagactccttgagcacactgtgggcctgacagattcttgtgacctgggctgacccggagagtgagccaccaggcatgctttcacttcattggaaaaatttgttcccatttggttctaaacaactgatttacatacaagatttgagtccatggctcatctgaaagctagcactgcctgtactaggctcccagcttctaaggatagaaccacggtcccttttatttttcctactctgcttttggaaactaccaacaagggtgccaattagcaccagatgggacaggcactgtgtgatgtgggactcaaaccgccgggaacgggaacgcatccactaatgcattaagcaaccaaagagccagtgatggggcagctatgagcaacgctcagctaagctctgttctgctcagggggctacatctgacccgtctaggttcctggtgagggggtcaggaactttgatctttgtgaccctcaaagtcatgagcccttgtgtacatgctgccttttgctctgtgtccattattattttaaacttgaacaagtctttatggggtaataaataagttgagggatgcatgtttatttgccttgaaacataatttcttaatttttaaaattaaaagataattacaccaattcccttcttcctctaacctccccccatgtaactctaccaggggatgggtaagctattaggggcctcctctctggggaagactatttctttggctgtcagcattccttaactgcctgtagttctgtctaggggttgggccctgtgagactctcccttccacattagcttgtctgctggtgtctttgttgttgagctcttgtttatgtagccatgttgtggcggtttcgtgtgtgaagcctccctattattcctaagagacacacacagtctcaggcagattccctgttcctctggctcttacactccctctgtctctcttccacaatgttctctgagccttaggtgcagattcttacttagctgtcttgacatttctggatagcctgattcttgaaactgtaactttgtcatgatgcacaaaccaagtgtaaaactgaaaagtcagaaaggctactcaaatttcactggcctacacccctgaaagcatagaagggaagcaacacagatcactactgatattatctgagtgttcatcttttccctcatttggtagcaatgtgccttcaatgcatatgccctgcagagagttcaaatctgagagaaatgacttaaggtttcatccataaaatgtgggggttgggtagcaacagtacttccagacatttttaattcataatggaatatatgaaaaatgatattttgagaactcgttgtcttaaaatgataggtaagatagctcacggccagagaagaacaactgagggctgggtgatatagaacccatcctgaccactcggggtcccatagaatcaacatctcagcgcacctggtagccatttgtagcacatccattggcacagatatccctagacacaccaggtcagaaggtctgggataataggtagaccacctgtgggtcttcgacagcttcaaagaatgaattgactgggatttggcactggtatgtgactgagtactgtggtcagagcctagacctaggctatgtactgatcccagagtagaattctcttggtttacacaattaaggaggcacccagttgttgggtgaacaactctccaggttggcctagaatgaggctttccatggcttgaaggctcaactagtcctctacccactatctgtcaaaatcctctattaatatattttcctagtggtacaggcactggcaagtggcctgtgccccatcaataacccatcagcaatgaaccaaaagcagccctagttaaactcacgggggtcaccaaaaaataaaataaaattagacatgtatgaagaagggagtttagttggaaagacgagaagggcaagaaaggatgatgggtaaatatcgtcaatatttactaacatgtatgagaatgccataaggaaatccattatcatatatagttgatatatgataataaatattcatagttctcaatttttctactaaggaaacaaacagaaggggacacagtttgcaggtccacaggctggcacagtttgccatcttccctgcccatccacagcagaggaatgagctgtaagagtccaagtcctctatggtttataaatcaggagtctgggagacttttcttgtgaagtgttttcctcatacagttgtttttgccagttccaagaggagacagtgggctgaagtcaggtggcatgaccagatgacgagtgctaaacaagtgattcgtgcgaaggtctgctgggaacagccaggctcatgacaatagcggctctgacatgactaccccttgcctgagaatctcataaacatacgctctaggctatccttggtttcagcagctgctgattctttcatttaattataagctacaagcgagcttctttaagaagcaatgtgtgtacagaacagtgtccagggcacagtctgttcacaaattttaagatagtcagcactgttggaattatatgtcctaataagagatgggtggactgtgtgggagaaatgggagccaccgcccgccccaagttaaaccaaaattgtttttgaggttcaaaaatattcacatgacagctttctatgtttggctagggcaaactaaacttgcatgcccagaaaatagttttctctatctgttaagctagcacaaaaagttgccacaggaaccaagagatagcacagccctggcttctaccctcaagcagagttactgtgccacggtcagtgtttgttgtgagcctactgtattcacaaaatcagtcttggcatgaaaggggtgagaaacggtgagagaaaatgtgctctgacatcaccctcaaaggaagtcactgtcacacacagcataaaacaaacagatcaagaatgcaatgccatgttcctggtagcaattcaccaaacctgtgtgaggccctgagtctattgccagctgtgcaaagaaaaagagaaaagaaaaatcctaactcccctttgccctttttatactcagataggaagagcagccctggcttgttaggaaaacacacagaatagaagaaggagagggaagagaaagtccaagtgtccactcccctccactgttggctggattagcatctctcttccatgtcgccgaccagttacaaatcagttgttgctggccactgtgcttcccacctgattcccaccatgtcaagaggaaattcgtgcccagagcacattccaaggtgtgacccaggagcttcggggcttagacacctccctgaggggtaagttggtaagcgacaagttacttctctggtgagtcatcttttcacaaggctttgtaactgtttccttgtactggaccagtcaaatccaaatccatataactgcagtgttgttactcttcttttctttctgattaaggagaataaaaagcacaaaactcatcacattggcctcatgctatcactggttccttctggagttctctctgaatgtccacaatgagcactgccatacataacctaaatagttcttatagtgggtctactgtaataacgaaatgccaaaattgcttcttcataaataaatgtattcagtaggtattgaaagatagagatggggcaggaaggaggagggaaagagagagaggaaaaaaaacatgagcatgcatttcaagttggaagagaaagggggttagggaaagaactggatgagaagtaatggggtgtagattgaatccaaacacattatatgtgtgaatattaaataaaatatttaatttaaaaagaagcaattgattaataaatgtgacaaccgtgtgcacaaagtggcctatcttcattaattcatttacacaaaaacatctatctcattcccttcatatacctaacacggcacaggccatggaaaaaaagtagggtaggacaaaatcctctccattgtgaatttcaccgttcctctgtgagaaaagaaataaagggcataagaaatgttcatttctcgggaaaaattatttagacgggagacaatgagtgggaaagagcacaagctgatacagagtgatcatgggtaactgaaaatgattgctgaacacgaaagtaggagaggcgaaggagagaggcaaatgaaacaggaaaggctactccaagggaagaccctggaagctgtcacacacagggttgagactataaccagacgagcaatcccattggctcaccggtgatattatctcaggtgtgctgagagacaagaatataactcattacaagtgcttggaaatcaagcaagtaaaacgtgtaagaaagcatgcctcaacttcttcctggtgacgcccagagcagctctatgctaagtgaggtgtgatctctgtttgcacaagcatccctggaaaggtacataacacagcaacatcagtccagaacgagccttccattcttcaacataattatttttgttttccattgtgataggctgaattcagccagagatgtttgttttggggagagggggcgtgaatgttgaaacacattctataaacgttgtgtaagttatggcataaagttacgttttataggcaattttattggtcttatatccattggctaaaaatctcaggtgctgaggttggtggaaaaataagctactgtctgcagaagttttcaataaaatggtcaagaaaaaaaaaagctgatgttaaagaaaaattgacgttgaaactaatgctattttagagacttttttaacattatattcatgcacaggagaccactttagaactttattcctctcaaagtatttcaatatttccaaagtatcagtttggtctttacagttgggtttagatgaatatatatttcccacaatttctaattagtttttaatcacctgtttatttaacattttccttatctgcatggaaaacttcaaaacagatattaaccgtggtaggaagtgactcgtggcttcaccaactgaaggggagcttccaagtccatggcagaatgtgaagaaaacaggcatagttactcctttctaaaacagactagaaaagtaaaatccagcagtgaaatgaggccactagcctggatgataacttctgagggctggcattcaatcactgatctcacctatccaaacaagcctagcattagttgctctgtttttctttcattatttttgaggctgggaaaatcgagtgtaattcctacagcttcaatttttttcctcgaaaaaggagctagttttctctattcattttagccatgcttcaacaatattcaactttttaaaacaacattgtttgggttttctgtgagagcatgtgcagtgtacatgtgtatatgttcatgtatagatgtatatgcacatgtgtgcacatgtctgtgaaagccagaggtccaaatcaggtgtctttctccatcatttctccatcttaatttgagacagtctgtcagtgaacccggagctcactgattcagtgagactgcctggccagtgagatccaggaatccttctgtttctgtctctctggggcctgagattataggtttaagccaccaccacacctggcttttcacatgggtgctacggacttgaactgaggtccttatacttgtgaatcaaatattttatgggctgtacgatctttccaatcccccaattttgtattttaaatatgaacatatactgattcactggactattcctttattctgtgtgactatgtcactgtgatttgtttaataaaggaaatggctggctaacagctggacaggataaggttaggggaacagccaaacagtggcagagcataaataaaaaatatgggtcaattgaaaatgtaagagttacctagtaacaagccagagctattaggtgagcatttataattaacgttaagcctctgtatagtgacttgggagcagcttgggggacagaaacttccacctacacattcatgcatatgtaatccaatgataaataaattttaatctttgtagcccacttagcttgaagtcatgagagtgcatagctctttctcccacagtagggtcaatttaagactccagagcagtggttctctagtttccatgcctctttaatatagtttcttgtctgagttgaccccaaccataaaattatttccgttgctatttcataactataattttgccactgttatgtatcataatgtcaatatctgtgttttccaatggtctttagtggccccttgtgaaagggtcatttgaccctaaaaggggttgagaaccactgctccagagtgactggccaatactccctgaagtctgcccctctgagtctgggtcagaaagtgtccctatgtacaggttcacttgaagaaggtgacccatgcagtcatgacaaaacatgctgcttttgacatgatgatcaccaccaggactcctgtgagataattaccaaggtgaactagtaacatctcagatagacaaaagggttacagtaccaagctaggggaactaaagctgtcaggcacctgtttaattgagtctcaaacatcaagctgtcatagcagaagacatcagtctagattggtatgaaatatctctctctctctctctctctctctctctctctctctctctctctctctctctgtgtgtgtgtgtgtgtgtgtgtgtgtgtgtaaaactaaaaatacataagcacaaatatcacacagaatcttacatacagatatttataatgtcatatagatgaagctcattgctaatgttacttaaaatcaactgcttaatacttcaaaacattctactttgttagaggcaggttctaatacaacccaagctgtctttgaattgttcatggagctaaagatgactttggtcttgaagccttccttcccatgcctccacttcccaagttctaggattttagctatatatgacaacatgcagatttatgtgatagtgaggataagtccgaagctttgagcacagtaggtaggtgctccagcagcagagctgtgtcctcagccatgacacattcttgtatgagttgtgtatccgctcaactgcactaagagaatgaatgggagggcaaaggcttctaccacccttctcttgtatcatccaaatggagagatgagatccttctttctcacatggtaaaaaacacagacatcaacaatgaggagtctgagaaaatgtgtttcttaaaggatatagtgaaaacatgtatcatggagaaatataaggcttaaactgtggcttaaaacccaacctgtgaccttgactgatcagagagactctgtgaaggaggatgaggcggatcatcaaggaaaagagtccctagattcctggacaaaccgtgcaaaatgacagtctccagtgaacagagcatggctgaggagaacacagaatacccagatctgctgttgggatacacaagcaactggaggggcttagactattttccaacttccaaaacatgctaccagagaaagttgttacgataaatctttctgccaaaagctgcctgagccccatcgccacgtgtgagctttacgccagccgcctgcccaagttaggcccaaatgaatacacagaaacttgtattaggttcaaagctgcttggccaatgactaggattctcatctattagctcagtcttaactatcataaatctatatattttataagacttatcttatcggatgccttattggcgtccctccttactggcatcacatcgtgctgctggagcaggagcggaggggaaaaagggccctccctgtttctccttcacttaaatatgagtctccttgctatgtcactttctgcctggatcagcacttctctactacatttcccagaatcctctttgactcctagtcccgtctacttgctgtctcattggccaaacagtattttatttaacaattaataagataaacatacacagtacattccccatcagaaagtctcttttggggataggcagattcccaggtcatacttggcatttataaattacatgctcaataatccaaggtccatttggcattgcattataagctgcagagagaattcctttgactctaccttcttaatttagcaatgaccctgatatgtgtcaggcagctcaccttgacacatgaaaagattggtcaaatttcagaaattatatatgttggttgtcaaatgctgtcactactgaacaataatgtttacaaactttcaaacagatacactatactaagcataatgataataaatttccgtcttaaaatcatgcttgtgtgtgggtgtgttgcctgcatgcatgtgacagcgaggacatcagatgtcctggaactggatttacagataattgtgagctgtcatatgggtgctggagatcaaaccatgtcctttggaagagtatccagtgctcttaaccatggagtcatctctagatccctgtcaatgtcctttcaaaacttaacactatgtcattatttaactggaacctggactcttgctgtgatgtatctgaaatagtagcatcataaatgctcagtaaaatggaagcatcaagaaacactgtgtataatgggagcatctgtgataaactgtgtattgtgggagcttcatagactctgtgtctaaggcagcttcatggacatactctttcctcccagcattgcctgtggttacaccacactatcatttttaaatgtgctagggagtgtatgtaccatgaaaatgtataaacactacaatttacagcttcctttgctttgttgatggtgtagatcctcagtttttaatcagatacaaatttgctcttttttttttttttttggtttttcgaaacagggtttctctgtgtagctttggagcctatcctggcactcgctctggagaccaggctggcctcgaactcacagagatccgcctgcctctgcctcccgagagctgggattaaaggtgtgctccaccaacacccggccaaatttgctctttatatgcccagcatgtgacaatgtctggaaacttatttgactgttccacctttgacatgggactggaggcttgtgagtagagactagatgatgccaaatattctgtagctcaccagacaacctcccacatcaaagagctactgtgcccacgagataatagcaccaaggttgactaacattagtctagaactaataaaaaaagatgtgggaaatattaactttgctgtgcctgttatgttggtctgtgtctgccctctcctcccttgttatcacaggcaactccagccagtcatctgcctgtagagttctccaggcaaagatagactgaattggctttctcttctcaaaaaataataacaacaacaacaacaacaccaatcttgaaagaacccacagcaagtgcccttcatcacaattacctaaaactaaaatcttatccaaaatatgaccaaggttctgtaggcttctctgaagatccttcttgtggtggggaaagcagcagtaatgtttgggtctatgatttcccaccaatggtatcccttaccaataatcctctacctcctattacctagcctgggatggattcatgggatgtgggtattgagacaagctgtattatccatggtgagcactagaaagttatgttctgaaggtatgttttttagtcgtttttttatttgaattagaaacaagattgtttcacataacaatcctagttcccttctcctgttctcccctaacacccctcccaactaaaaccctacctatcacacaccctttcttctattcttcccctgactcaacctttctgctccctcatgacctctgcatccctcctcctcttcccttctcattctcctagctccctcccccctcttcccatgctctcagtttgcacaggtgatcttgaccctttccccttctccaggggaccatgtatgtctctcttagggtcctccttgtttcctagcttctctggcagtgtggattgtaggctggtaatcctttatgtctaaagtccacatatgagtgagtacataccatgcttgtctttttgtgactgggttacctcactcagaatggtttcttctagttcatccatttacctgcaaatttcaagattccattgtttttttccactgagtagtactccaaagaaggtgtgtttttacaacatattgctctcagttttgggtctctaatggagactctcaatagtaaggaggttgctaggtcatgccctacttacaaacactcagagtcagaatctaagatctggacaaagggaagctccatttacatgagaacacatgatattcagtgtgcctgtcctagtgacttgtctattgctgtgataaaaatacttgggctaaaagcaatttttgaagaatttattttgacataagcttccagagagaatactggtccgtcatatgggtaagaaatgaccataggactgtgagaatggaggaacacatctcatatgcacacatgcacacagacagcacacacacacacacacacacacacacacacacacacacatacacatatacacacacacacatacatacacacacacacacacacatatatatgcacacagacacacatacacatacacacatgcacacagacagcacacacacacatatacatacacacatacacacacatacacacacacacatatacatacacacacacatatatatgcacacagacacacatacacatacacacatgcacacagacagcacacacacacatatacatacacacatacacacacatacacacacacacacatatacatacacacacacacacatatatatgcacacagacacacatacacatacacacatgcacacagacagcacacacacacatatacatacacacatacacacacacatatatgcacacatacacacatacacatacacatacacatacacatacacacatgcacacagacagcacacacacacacacacacacacacacacacacacacacacacacggtggggggataaggggaacaggctataaaagctcaacctcccttggtgacacacttcctctagcaaggctcacggcctacagactccataaccttcccaaacaacagacaacaggaccaactgaggaccatttaagtgttcaaatgcacatgagtatgaaggtcatttctcatcaaaaccaccatgctgagactatgatgggacacaggcagactaaacaagccaatctgaaagtgtcccatgggactcaaaccagtcaaggctcaaaagtcttctagattttagagaggtttctgagttggtggaagacctatggacaaaaggaagctagatcttcttgcttgggaccaggggcactgatgggataatttgggccaagagattcactggtggtaacaggccagtgatttatccactgagtaaggacctcattagtgtctaacttgggtggtacatctcacaggacttccattccttggcttatcccatgagttaccatgaatccctaggcagagtcttgcctcagtctaagtagaggtggaccaacaccaggcactgttagttttgtttattttgttttgtttctgaggaagcaaaataaatgttatttgaactgattttgttaaaagacaagaaaatctaatgatccaaactgcagataatggaatgttagacttgaagataccacattcaagacataggaatccctaggagtcaacagtctgaaaagtagaaccagagctaacaataaaatatgtcattgcctccttgtctccaaaatgttaagcagttcattttgtcctcccatgaggcacagtcatgaaacagcttttgataactactgattggaaacagagaattgttcaaggtacaaaatctggagtccctggcttactaaagtagcaggcaatggaggtttacttctatgagattgactcttattgtctttaatcaaatgtgtatggagtggatatgagtgtgagtacaggtgcccatggaggccagaagagggtgttgcatcctgagaccagggcttacaggtaggtgaaagctgcctgatgtaggtgctgggaaccaaacttgggtcctcggcaagaatagtacaaacttttaactattgaaccatctcttcagccccattggggatttgcttttcataaccattttacttacatgtgtttaaaaattgtttaggaggggctggagagatggctcagcggttcagagcactggttgctcttccagagctcctgagttcaattcccagcaatcacatggtggctcacaaccatctgtaatgagatcttgtgccctcttctgtcctgcaggcagacatggagacagaacactgtatacaaaataaataaataaatcttttaaaaaattgttcaggagctcagtaagtaagagtccttactgaaaaaatatgagaacctgagttcaaatccccagaacccacatcaaaagccaggggtgggtacatttgcctatgaccccaagatagaagtttgggatggaaatgggagactcattggagctagcaggacatctggcatgctctgactaccacatatgcacacaaaagcacatgcatggatatacattcctaaaaacaccattcatacacactctataacatacacatgcatacacatctacacacacatacatgcatgtctctctctctctctctctctctctctctctctctctctctctctgtctgtctctctctccaagaagaacatcgcccactctagggatatgtaatataagtggctttaagacttaagcttgggaacacaagctagagtcatctgagaggaggatacctcagttaaggaaatgtctctataagatctgtctgtaggcaagcctgtagggcactttcttaattagtgatatatgagggaggcccagcccattgtgggtggtgctctccctggggatggtggtcctgctttttgtaaaaaggctgactgagcaaatcatgatgagaaagacaataagcagtacccctccatggcctctgcatcagctcctgcctccaggttccttccccgtttgaattactgtcctgacttcctccaatgatggactgtgatgtggaagtgtaagctgaatacacccttttccatcacagcaataaaaaccttaagacagatttcctcatctgctagtgaccctctaatgtgtaaggtcctagaacctctctttgtgtacttccaatctgagtctaccataagccttggaacattttgaggggaaaatgagccagccagcagtgagtgatgacaagcagaatactccgtggtcactcaagtcacctcccatgagcataatgaattcagacataagtctagggattagggatgtgccccagctgacagaatacccaggtgtacacgacaccctgaattcaaaaaccaccaacacatagcttgacttttcgagtgcatgtgtattgtggtaattgtcaaaatgctagtgttcaagaggctgctacatttcaaggttatcctacctagccaaaaggagtccagttgagctacagaagaccctgtctcaaaacaacaaaccccaacaaatgtgtacgttcccattacctgttgaggaaggtgagagccatccagtctgaccacagactggggatgcttattgctttgagatgcttgctgcagttccgtcatcaacaatgccttcccagtacaacaaatagaacccctgaccctggtcctgatggacctggcccctgatcttgcccatgctggttagaggggaaggcaggcaggctttatagtatatttctacctctctctcacaccatcttcccctcatatcgcccagtgagaggcagcagccattccacagtgcaatggcttcttcagaagttgcaggtgtcatgggaagaactctggagtgagagttaggaatccatggtctctagttcctaagattatttaacaattctacgaagacttcatgggattaagtctagatctaccctgattaaaagtctctataatattctgagaaataataaaccattccctgtctctcactacaggatattgctgttatgggcaggaattaaacagaaacttagaaagaaagaaagaaagaaagaaagaaagaaagaaagaaagaaagaaagaaagaggaggaagggagggaggggagggagggaaaggaggaagggaagaaagaagggaggaagcaggcaggggagggagaaagggagggaggagggaggagggagggagggaggggagggagggagggagggagggagagaacattgtgtggtgttctgaatcctcatctccctaaatgttcaccagtgttcagaatgtgcaatcttcatactcttggattgtgtgctgcattgcatgtattctgatgggtttggatagagcactgtagtgattcagttggcccctgtcatctacaagattctgctgtcttattccattggcctggaagaacaatgtttcggggcagttgttactatataagaatgtcatggtggtgtctgaattaaaacatgaagggcaaagtttaagggctggtgagtgcagacagcccttcccccacccctggtacattccagcagtgtcaagaaagaaatcaccttgtgcttattcactccatggaaattgatctaaaaacaggaaatggtgtctttctcacatgagggagctaaccagtcttgtaagcttgctttggtggtacgtaattcaaaaccttggagtcaaagaccatgctgcaagacctccccagctcagagagaaatctctttcctcctgctcttccaccaggctgagtgacagcagggacctcctgcttcatcaacttcatccctgatcccagggatccaaagccaatgtgggcctttgaagatgccagcctgacactcaaagacatgtaaaggtaacctaaggaatatatacactacaagaaagaggaaaacctgaagtgagaagggcatcaaagccgggactgggggcattctctgtgcaggcagaaaatgataaagcaccctggctgttagtgcttgagggaattgaaatgcactgttattacaaagccataatgaaagcctggctcaagtgcccttctgcctataagtacagtttctcagagggagactggattcacagggaagatgatgatttgtttgggatttttgcccctaaagtgtaagaatagcttaggcattaggtattcctaatttgttagaacttgtgagcaactggcaaagttggcgagtgtaaagaggctgagactgcattggagtctaataaaaaaccccaataaaagttttaaactagttcacacatctgcagtctaaccgggtgtcgggggttattacctaatgtgtgcaatggctgcagcggctacaccctccatcgctggatgcttgctggagtatgagggtggggagcagtatgggtgcaaccttcccccaggcagcagttactgctatacagggaaccttctcaagaacctcaaggggaccgaatttaaaaaattacagccaattctcttgggtccccataatttgtacttgcaagcattcttgaggcagggctggggcatgcttcttccatgttcagatatctttaccaggacacacacacacacacacacacacacacacacacacacacacacaatacaatgtctggggtttgaatgtccctgtgcaaaaatactcaactctagtcccagagcacaagttcaaacaccctactcctcccagtgccaggactgagcgatttcactagaagagaaaaagcagagagccagtgaaggtgaggtgggaagtccatgatttccttccacagtaaaataattcatggagaatcttgagaaaatgcagaagatagaatttttaataaaaaatttaaagctttataaattgttgatattacatgcaaagaaaaaatacttgtcccactctagagtattacgaagtgtttgcgttgtgagctgacattcaaatgtgtttaattaggtgatggttaagattgctccagcacagtgcataaagctgtccagcctaaggccttagcattggctccatcccaggaaagggtgctggggggcacttccagctaacagtagcagccttcaaggccagtgcccaccaggagcacatagatcaagtcagctcttacaggctggtcccacattcatattaaaaaggagaaaatctaccttctgggatttttccagagcttctaatagtctccatcctctcagctcatcaagcttaaaatggtcccctttgttagatctcagcccacctttgcttcccagactaaggagatgaaacccctcccctggttgtggactatacaaaggacttttcagttcactctatttccctgaaaagaaaatcttgctgtctcgtaaaatgcaaccccaatgtacacaaaagcacagggggcagtggcagcagacggtatgcaaaccgctccttaagtagagatggcagctactctgagcctgtgggtttgcatccggtgaatctgcaggccagactgctagcaaactcacttggcctgactttaagaaagagactggttgcaaagctttattttcctgaggttgaaagcgtaggccttcctttgcagttaggcatgcatttaagaaatgcaaactgcttttagtagagaccattcatctcctctcaggccctactccttgcctccaaaaacagagatgcactattaatgttcaacccatcagggagcaaccagcaagaacctgtgaattctgcttagaacctgggctctgtagttcccactgttttctggtatttgctgggacaaacaaatagaactgtgtatatttgagctatgaagtggttctagggacttccatgaaatcacagaacattccttcttcattggcctgcagttcttcctgatctaacttgtctcagggtgcctgagatatcagcttcaggtggtatagagaagccacattgaaagccaggggtccatacccgaacttcatctgggatatctatggattaagacaattctgcaagggtgtggagaaaccacccggtgctgagtcatgtctccattgagtggagcagtagggttcagtgaggaacgttcacacagctagcagaggggccaatgtttggacctagtctgtctggtcttaagcccatcatgatattgtccccccttctagtattgactcagaagtgccaacttggtttttcaaaaaaagggggaagctgttctaagaaagagtgtctttgtgttctctagctgtaacctagagctatgggcccatttcttcacaaccagagcatttgctctaattaaaagggctcatgtgaccctggggacatggtggtatacccaggctcttccagaaagagacatctaccagtacacaagtgagagctggccaaaaggaaggattggcacagaagaactgcaagagggagaaaattaagcctggggctctaataacattgggtgttgactgacccggaacattttgtgaagaaatggataggtgtccaaagacactgcctaccatggcagaagacactcccttgccaagctgctaagaatgtttggcggttcagagtgactcttggtgctggtggaattcccagccaaataaaacttttcatgtggcttgttaccaatagttttcagtggtaataatcactcaggggaaaaaaagcaatctttatacagatattttatcttctagatatgttcagttgagttcttggggtgtgacacctcttctcttgagagggacctttccaatgctctatggccatgagattcaaagatgacacacccatgccaatctaaactccagggtacagcttcagttccatcattccagtctggagattctcaaagctggctctgacttaggaataccaaggggccagtacaaatgtaatgagtctgggttgggttcccctgtcctaatcagggacacctgactccagaggtctgctcacgggatccgaactgggactgccaaggccccgataacagtcctgcctccatccaagagaagaggacagacatcagagtattagtttgcatctaccagaagggaaccttggtcccgtacccaccaggagaggaagagactcctgctacacccaccagaagaaaagatgagaagaagacaatataaaagcacattcaacaacagaaaaaccaatatgacaccactggagactaggtaccatacaccagcaagaccagaacatcacaatgcagatgaagcagaagagaatgaccttaaaaacattttcatgaaagtgatagaggacctcaaagagaatatgagaaaaatcccttaaagaaatggaagaaaaaaacatggtcactgttctcatgacagatcagttacaagactcattcacacttgtggacactgtgatctctatgcctgccttcaacctgtgacacaattaattaaagagtgacgctttgctctgcttccacctgaaaacaagctacagtagagcagggaggagcaaggggaagtgtgacttcatggggaagacggtttagcacaaactcattacttatctgtccaccatggctttaaaatagccatggggaagccacacactcaccatcctggtgatgttaaaataaaatattttagaaagagaacatctccattttcagagcaaattctttttatttattttccttattttctcttcagatatacctaattagacatgacaatatcctccttgacatcctttatttttatagtaccattttgtaaataagtaaaaatgacccttcctgaccattgcttgacaaataaacctgtttttaagtatgaaaaatatgtctaaatttgtctctgaggaccacatgtctgctggacttcagcttctcccttcctccctctttctggcatttactgaaagcacagaatgttgaagacgggccttctgtcaactcacatggctcttctaccctccctccagtcaatggaaagtcttgggacaagattctagagcagggccttaacattgctagcaggagaaagtttagatttctaacctttaatgaaaggaagctgctatgctaggcagcctgtgatgttcagtgaagtctacactctacagagaactatacctcatactacaggctaaaaaaataccatgataatcacagtcaatagcaataataacaaattacagataattattgaatttggtcctaattcttttagttatagattaaagactgtattaaatagttcctagatatgctacaattttccacaaatataactactgcataaatcaagacccaattgacccttgtgtcatactacaaaactttgcttggtgtttgggagatgccatcactgagaaaaacttaagtgctagagtttgtgtttccagtgcagacacaagtctctggtccttctgatagctggacatgtgtctttacatcacattttaaaatgtcaaacacgaaggaagctaatgacaaactctacaatttaaaattcagttttatagatttgcctatgaaaagatcatcagaaacaaagactattttacacagaaacatcctaaaaaagttgtcatagttatgtcaaatttccaaggactcctgtccctagaatgtttacaatctttaaaaagaagaggaagaagaagcagaaggaggaggaggaggaggaggagggaggaggaggaggaggaggaggaggagaaggagaagaagttaccaagtagtacaaatggttgcaaaatatcccatctacgaaatattggagacaagctcaactttctaactgtgaaaagaatttactagaagggtaatggaatagatgcaagtaaaacagatttttgattttccactgagcaatgtcatggtttcagaaagagctgacgagaaggagaacggtgttgacaatccatcacttcatgaaccacaacaagcaaactgttatgacaaggacttgaaaacatcctgaataatatgaagatttatgacttgcatagaaaagattctcaaaaatgaggaactctgaagaaattagtattttcagaagcacttatgaagtatgacaaggatatcaatggttagaattcttaaaaaatattaagcataagacaatttcatttataccatcatttttgtaccatagataatgaaaacagctacaatttgtcagcaataaaattccctgcacgactagtaagataccagttgtctagtacggtgtggcttaccacacggtgcaacagtggcactgcctggtgttttggcaatccgacggaccaagatgctttcacggttgattcccttttccatcagtcacttgaaggcaagaagcttactaacactgcccaagtcaataaatctatttttaagtcagcggtgtttttttttttttaacttattacactctcgtttattctgtgcagcgtgtgtatgtatggggacatgtgcatcacagcacacgtgtggaggtcaaacgacagcttgtaggagctggctgtctctcctccatggcatgtatcccaggaatcgcactgtgtgcttagacttgtcagggggcttttacacactgagccatctcactgccctggtaaatccttttcttcttaaaactaatgaaattgaggcaatctcttgacagatgttttatttgatttttactgtaggggaaatttcagccataaaaactgcattcgtattgtttccatcccattctgtccttttgtatggctggtgtgtccatgtgtttaggtttgacctcttgagcctggagctcatcactgaagagaagaacaggtccttcctctctcagagcccattgattctccaaagttcttcatttaggtgtggacctgtgaaattcccccagttcctgtaggcctggcagctggtgttgtcattatgcagctcttgtgtgggaggctcatgctgttgaaacttcataggtgcagcttcctacattcagctcctgggactcacaaggtgaaggagagaattgactcccacaagctgccgtttgacctccacatgggttatacatgtgcatgcccccatacatacacacactacataaaataaattaaaatgtagtataaatttatatacaatacatatatattatttgtgtgtgtgtgtgtgtgtgtgtgtgtatgtgtgtgtgtgtgtgtgtgtgtgtgtgtgtgtgttttagaaacctataagaggctatccaccatagtgaatcatcttttcttataaataggaaggctccctgagaaatattatgtctaccagtcgacagtgctgtagaattgtttcacttcgtcattggcaaactgataacacattcaatgccaagagtaaaattctgggccgggatgcacctgtgtttcagaggtgtatgtaaagttaaatgaggtgaccctaaggatgtaagagactcccttggcgattgccatgaagcatggacttgtttaaaatgaaagtttcaccaagcatttgtcttctttatagctatcaaatattgctgaatgtaacacagaggcagacatgtattactcttgtatgaatgctacccaggacgtgatgtaaagaattctgaatgaatttgccttaatgattgggtgatgttttcccattgtaagtgggaaaggggcactacagagccaacatttactgacatttgcatgtgagggagaaagagtagaaaccaaaacactgtaaatgctgcgaccatggtatgatttcacagccaccgatgcaaagaagcagctagatgaacctgattgagagggagtctcagtgtgagccacagtctgtgccaaggacagtcaccataaaacctgccatggcgagctctcagtgtgagccacagtctgtgccaaggacagtcaccatgaaacctgccatggcaatcagcacagggaggcattaaaacacatcaaaaacatgatatatgtcacttcataaattcccagctaaacatgaaacaaacacactctaaggatttatttacaactatttaatatataaaatgtatgtgtatgctcaatgacaaaaatcctaaatctgtgctgaattaacgtatatatgtgtgtagcatgaattataattactcttaataataaaaacccagagtcagatataggagtaaatgctaaaagaacagagaagcagaacaaccagccaccagctcttatctctaccagatcctcagatcaaatgggcgatcctatctgtaggaatcctcagactgaatgcaatgagctcctgtttcctcctgtcttctattcctctctctgtccagccatagcacacctgtctccacctccctagtccttggattaaaggtgtgagctaccactgcttagctctgtttctcttttagactgaatcaattttgtgtagcccaagatggccttgaactcacagaaatctgcctgcctctgcctcctgagtgctgagattaaaggtatgagccataactgtctggcctctatggctaactagtggctagttctgtactctgatcttcaggaaagctttttttgttaaagtacaaacaaaatatcacagtgagtagtgtgtgtgtgtgtgtgtgtgtgtgtgtgtgtgtgtacacagagcatgcacatttctttcatctgaatgtcagtgctcttaatgactcaaccatgtctccagtgctctttcagtttttgattgtatgaatatgtctatttcattttcattttctacagcacaaatggactttgggaacccattccctatggagggatactattgcagcccagatacagcaaggaggtcctaagccctcccccaaatgatatgacagactttgaaggtccccctggagggcctcactatccttggggaggagttgggagaggggttggggttgttggtgaagaacatgggaggatgggaaggcaagggaatggggggatgaacatgtaaatattagtagtagttaaagaattaaaataagatttcttattgattagggttcttggctagcagaggtttgcttctcatgcagtattttagacatatactcccttgtctcctcatctgcgttgtttgtgctgaggcagcagccatctccttctctgcttctgactctaaatgcctcttccccagcctgctaatctctcccctaagtactgaccagagctggctctgcttagttgcttcctgagatctgatgagattatggtgtttagtgtggtatggccctagacaccttcaatttttctcaaaattgttgttagtcattttcaggaattgtattaagaagtgtcttttgtaactttcttcatcctatgtattgtgtaagtgaaggtcttatacccgtgttcctgtagtttcatcattgggaaaatctttgcgtacaatacttgcaatttttttcctattttgctcttctcacttcctcccagtgcacacactggggaatttacacatctcaccagattttcccattatcacaggggtcgctgggactttgttttctcttactcttcatctctccctgcccctctctacatggatgacttcatgtgttcaggttcactgatcttttctcctgagatgtctattctgggaagctcacccagtggaattttcctttcgcagcttgtgtttctcgtgtctagaaattccatttgctcttattttagcttgccattttctttcatgctcatttttaagtgttcattaataccaatattcctgtcatttctgggtctgtttctaggcatcatcttttccctcctgattataggtgagtttactgcttcttttcgtatgcagaatactttggatgatttaattatatcattcgcttcatgtttataaagatgtggtttatttttagttatgtgtcagtgagtgtgtgactgtgtgggggcggggagatgtatgtgtactcataggggtacccacggaggccaccagaacgcaccagatcctctgaagctaaatttccaggccaatcagagccacccaccatggatcctctacaaaagcaggaacagatcataatcattgagccttctctccaagcccctacttccttgatttggatgccttcctttagaaaataaaagcagttattgtcatcattatttaactagttgtgggataacctgactcacttgaatcttagtatgaagcttgatcaggtcaagcctcaaatcactgatttggtagaacccatgagcctcatcttggctgagggttccactccgtgataccagtgtgtgggagtgtgccgatttcaatcacttctcaatggtgacgcacagcttttagacccaaggcacatcttctttctgtcatcatttgcttccagcttcatgaggtgcatctagattcagcaagctatagaatgggggtttgtggctgctcccctctatccctaccttctcctgctctctgctctgcagcctctagctcctccagtctccgcagctctgtcccggcgggcgctgggatcaggaacaagcctccagactgaaaactcaagacatcacagcacaccttacagaccttcctcctcactttcctccagtctggcgctggctcttgtccaaaatctggagagatttacttcacacaccaggctcagatacacctttagcacaggcaagttcttccaacactagttaatcagtcatgactagaaagctgaattgcctgttaactttaattttttctctcattgccagggaagcatatcataaaggtcttctatagcctaccatacatattacttctttttttctaatccaacctcggcttcataccacctgacaaaatatttgcccttcaaagtcttaataaatgccagaaactgaaagtatttcccaacatgtggcaggcttcttaaatagaagatatgttttcggtgctaccctgtcattactgagccctaagtcttctgccccaattagtttgaccctccacttctgactaagatagttgtcatttgctagactgccatagtctcactttgttggtctgcaagttttcctttgtgtgttatctggatttcattagcttttttttttcttttccttttttatatgcaaatgagcctaggtggtcataacctccctaacactactctcttcagagccacttgcagcatggctgtttcatttttgttaaaagcatctcatgtccttcgggaggcagaggcagacagatctctgtgagttcgaggccagcctggtctacagagtgagttccaggacagcctccaaagcaatacagagaaaccctgtctcaaaaaaacaacaaacaaacaaacaaacaaagcatctcatggttttttatttgtttgtttcttttattttgttttttgtcattatgaccaaagcatcatattaaatatttccctttcttcttcctgaaagaactacatggagataatagttttaaaattatgaatataccctgagggatgtcagaaacttcagatatcagtagcctctataaattgaagccttgacttctaaactgtgcacctgttgtacaccgtagtcaccactctttccagttaaggtgcaacagcaaaaagtataatttaaaaacatgaaattctttttccttctttacaagcacgcggaagacttattcttagtgtaggtcgctaacagcatgcgattcatttcctttttacgtcattttttttttaagttttgaaatccccctctgtattgcataagatttttatataatgggtttcgacaaaacccaccctcaccccctcctctcaagtctttcccaacccctccagcgttataccttcccagctcacgtgtccttctctaggaccgtctactagaatatgggtagcctttcagggccatagccctgaagaaaacagactctacttccccaagaagccatcaattatcaatagcccatcagctatataagtgatgtcataagcttgctggggttttgagtggcttgaccttgagagggcactatgcaagcagccacagctgctgagttcatgtgtgcaatggccctaccagaaagtaatattttgctgcagatatccaccaactttggctctcaaaatctttctgtgctctcccctgatgatgtctgagccttgaggggaaggagtgtggtatacatgtcccatttagagcagatccctccagagacgacaactattgtatatagaaacgagtatatgataggttacttttctttcagcatgataaaggggatatcacatgatattgacttgattctcacaagactcaatacaacttactaattgtttatcatatccaaagaattgtcttttaaatataaaagttaaggatgaatgtcctatttcaggggttgacaaattcatagaagagaacccctgagaatccatgaattcatggctcctgtctgtcttcttcagcatgccattcattgttcctaggacagtcactgctcagagaagagagggtggtcattcgcgtatattggattagtttaggtagggtttgcaaacagactactaaagaacagtaagtgaagagtgacctgcaatagggtaactgtaggagtctgaaagggggaaatattagaagtgaccccaaaaggcccttacactctggccctggacacatgggaagggcccaggaccagcataggaagacttggtggactttgcagagcccccgttgagggccctaccctgcctggggagtggtgggtggatggggtggggggtgggctgggggtgggggaggagggttgggggtgaggggagggagagggagaagggacttgaaataagcttgttccctaactagaactaataaaataaaataaataaaaaaaagagtgaaaaaaaaaaagaaatggcctttctactacaattaagtcaaacatagaagccaatgacaaggcattcataccaagggaagagacgaaacaaaagagcatgaatggagcgccacacaggtgctggagaaggatgaagaatcaaactgtctcaagttcagctagagacgcggcttgaaacttagggctggcctgtcacagaagcaactgagtcacacagggggttcacatctgatccaaacacaaggctctcaggacaacacactaagctttgctatgtaagaacatggcatcagggacagagtctaacacgcatggcattctccatacaaaatgcccacagaacactctcctttggaactaggaaaccccagacttaaattattattctaaatatcctaatggggtgataaaaaaagtgagttggtatttatatcatatataactttgaagaaagacctagatgtaggatttgaaataaaagaataacccaataggttgtctgggtaacctgaacatcatcttctttataaaacctttgaactgcaccctggcacaaggtgctaggatgtggttacagttggaggatggtgaagtatctagaggtccgtcttcaagaaacctccccatccaggagagaaggctcacagtgacctttgttactgtcagaaatgatctgaacgatcacagtcagcccaaaaggacagaattggtgagctctgctattgttgatcatcttcaagtgttttatttttttttcttcttagcaggaacactgtgatttctcatctgactgagataattaattccatgtgctttgcagttacctctgtgtggtgaaggaaatgttagagatgacttatgtgaacctccctggaaggcaagattcatctgtctcttaaggattacatctatagcaacagccaataccattgatttactccaagatctgggcaaccaaatgagttccttcctacaaacccaccccacaatgagacactgaggctgaagagtggtctggaatctgcaatggccagaggagatagggagccctgtaattttgtggtaaagagctttaggctcccagctgccaccacagaaacccacactggacctccgaatcctcatatcccctctgtttccaccctataaaataatgaccagttcacatgaagagattataccagtcatagcatgaaacaactctagtgttcctcttagtggagttattgactaaagcctctttccagaatgttccattagtcagaatgccagctagtactaaatgggcagagtcactcaacttttgtctctgaccattttgactgggctccaggctcttcctccgaggggatgtggtttagatttttactctgctcatgtctgccctttcttgtcagttggtttcccctgcttcagtgacaaacaatattcgggcaggaggtatctcccctaacaatgggttgggagaggtcaccaatttctggttttgtctcattctaaaaccacatgggtaaaaactgaatgtcgattggaaatagagcagtgtctgtggatgaatggggcatgtaaaatttactttgtcagctaaactataaattctaataaatcacattctagtgaagttttagtgttgaaataattggattgtgaggttggggttattttagaagtgtaatatgaagatgatggacaacaagagatagtcttctgatattgtgaaataatttttcctgtccatggaaagacgtggtgagcaggactgaatttatcaatgtcaaatcaaaggggaacaaaatcttttaagtctgaacggttaccgtgaattataaagattaacctcaatgaagcataattgcttctatgaatcaagtttgtttggtttgttgtttgaggggggtcgtttgttgttttactttttagacagtcttgtcaattattataggctggcttcaaatttctgatcctccagccttagcctcctgaatgctaggattatagctatatcccaccatgcccatctgaatcaaatttttatcatgattttataccataaaattaagagtcacaaagataatgtttattgaacactttgcatgtgccaattaagcactttctgtgtggttttggatttctgtcttaatatgtggcctttttttattacatacccctgttcaaattacaagctcagaaatcgagcttgggcagaaagcaaatgtctaatggagagtgaggctgggaccagaattaaatcctggcttttaaacactgctcacttttatacataatgtttctgttaccgtgtgtgttctggtcatatcatggcacatatctcaaaagaacactatcttcttaaaaggtaggatggcattaactatagaagttagcatcattagctataattccaacgactcaagtaaattaagagtttactgataaaagatggggtttgactactgaaatgggctcagcagcctagtgatgtcaccctctctacttaccaccctagcaggaaggagtgctgtctcaaaagtacacgatggtcactagagtatcaagtgacaggatcatgttcacaccaggaaggagccagaacatctgttccttctacgaggaaacagctttctcagaacctcagcagactcctctgctgtgcctgccctgagctctgccatgtggttccacccagcataaaggaaagttacaaaaggaagtaataattctggtggttttcaaagtgaaactagggtaggagagaagagacaggtgcagggtagtgatacaacagaacttggccacagtaagcattcagaaagatggtgtcaggcagttctggctgctataataaaactatcacaaaatttgtggcttaaacaacagaaacatgcttgccatggttcttgggactgggaggctgaagatcaaagtaccagacaatttggttcctgacaaaactccattttctggtttatagatggataaatattacatccttaaatgtcagaaggaggaacaaatctgttccctcctcttttctgtggacattaatttcatcgtgagggccccactctcagatttcaccaaatccagaggctccacctgcaaatactgtggatagggttcccacctacaactctgaaagggagtgttcacaaacagagggcattctgtgagcagagcagaagagccccaacaagctgctaatagcattcttaaaaaggtttcattcaaagacaagttcttatggaaagaaaacaagtacctttcacttgggccactttagtaaaagagcctcttacaagggtatgtctggggcatacagaaagttgagtatgcatagctagtatttgggtctcttgtgacatatggagaaaaatgaggaagtaactcggatccatatggaaatagctataggaaggtgcatggtggatgcaatgggagagaacaaccaacccgtgctgccttcaggagggggagacagtgttttccctggggaaaatgtttgttaaagtacagaaataggtgcctgttttatacgcaagaaagagtcctcccatgaatggctctctaacaataaagcttcagatactatggtaacatacataatagagaaaaactgtccaggagttctggatgaataagaatggtgttgaagccatgaagcacgtttggaatgaggtctgatgtgtgccgacaccactcacgctcacacgaatgtgggtgcccttgatgttgcctatttacacaccaccattgagaaccttggggatttattttcctctctcttaatcatttcatcagtttgaggttctggtgtggttggtgactgagaactgtttggcgtgttgaagaaacacataacattttaattgtgcttggagacggagagactcaatgagggagactaattaagaaacataaataagctggagttctgctttgcctcaatcctatcattatggctcagaacaaactgctgaacttcattatgagacaaagaagcagccaaggccacatattcaggggtaagattaatagctgcatggaacctacaaaatgaaggattgcagcaactctgatattgcaattatttttctgtgtgctggagtcatcaagaaaaacatgaattatttatggggtaaatgacatgttctctggccacaatctctaaacatatgatagacactttgtgagtatgtatgcatgtgctcacatgtttgcagaggcacacacacatacacacacacacacacacacacacacacacacacacacacacacacatctaagtatatataagtgcatgcagaagtcaaagggcaacctcaaaatatcactctttagagattgcccatattttgttttttgagccaaggtctctcactagccaagtaggctaggctggctggccactgatatctagaggtctctgactcacctggactgagatacaagagccaaccactctcactctgcctggccctttccccaatgggctgtggaaagtaagttcaggttctcatgtctgtaaggcaagtaattcactgactgcaccatcgcctcagcccaagtaatggacatttaagaatacatacatctcacccaagaggtttgaagtgggagctgctattgtttccatattggaagaagataaggcttgaggaatccaagaggcatgtccaatatgccttcgtctctcagtgccccacagctgctagtggacattaagagttgggtctcacttgaagcttgtgccataagacacccaaggcccttgaataaactgatatttttatggctgacagaagctcacagcacactctgatttccatgcagaattaccttgtaaacaagtaatgcaaaagcacgtgacagagaacattcaaacgcgtgtcggtactggatattcttcagctggatatttgcatccggacagccatcgacgctaagtatgaatgttgctttctgtgataatgtgatagcaacagtgcctatgccgattgcctacctgggtccaggtgggagagcgtgttcggccaaacccaggcagtgacactcagtttcagtcagagtcactcaactctggctttgttgtgtgaaagcatcacaggtggtgcagaaatggatgtgcacagttatgtcccagtgaagatttatttacgaaacagacagtgtgaactccaaccacagcctgaggtttgcccagccggctatttaagggctaaaatgataacatcttgcagtggaaactttagggtgttaagaaaagcatagatgtagtatagagggagaaattactaagtacatacaggtgataaacatttccatattactagtcttactcaattttcacatctaaataaagttgtaagagtggactacttggggtagatagatggctcgcagtcatgagttgagagcactcgctgagcaatcgtgaggacaagacttcagagtccagcgccatgtaacaagccagggctccagcacatgcctgtaagccacctctaagtagagcagaggcagaaagagtgagatggctggggctttgctggcaaaatataagttccaggttcagggcaagataacctatctcataagaatggatagagaataacagaaaagaacaccaggcacccctcttctggccaccaaatacatgggtggatggatgtcccccacacacgagtgtgcttgtgtgcatgagtgtgtgcacgcgcatgcgcgcgtgcgcgcgcacgcgcgcgcgcgcacacacacacacacacacacacatcaaaatgtataaaagctttggtgaagaaaacactgactagatttggcatagagacatacatgtaactgctgtacccacctctcctacacacatatcccagaattagaaacatggggctcccatcatgctatattctaaatcatttatcttctcgaaaatgtggagaagtcattgaattggtaaataagactttcatgggcttgaataaaacatattaaatatttggtggccaggggtttccatcaggacttcgtggcagttaataaatcaacagaaaccacttactgaaacatgttcataggtccagtggaattctaagtaaataccaggtttaagaatgaaaagtcagttatattttcaacataatctaactttcaaagaagtgtaaaagatgcttaagtgttaatattttatgtttccctgctctcagcagtaaatgcagcccattaaaaagaatgctaagccatagctgttagcgctggcatgggaccaaggaaacattgagctttcacagaagggggttaattgctacacgaagaggtaatttattaaggaacactgcagccctctatgtttccccatgtggggctgaatggagaaatcgtatgtgaatattacatttgataatcaaggccttttctatggtagactttagagctggctaagctaaacaaaaaggggaggtggcgagcaaccaaaaaaattccaacaccatttttctccatggctctcataaagctctacttggtgccctccagtctgttggccctaccaccaggaaagtttgctacaccataaactccttggtggctgaagagaatgtctcctataatgagcaggttgaaggtcggtctctacagttctttcttttatctagatctggtgcttcagggcactgagtgtcaagcttcatgtcaccatctgtcaggtgatgacactcgcaaactcttatcacactaaactagctttcatctccatcaggtttcaaattgacagcatgtagcatattaaacttgagtgtgtagagagaactgcctccaccccttggtggcactcacttctggggccaatagttgccttgtccttccctgagatctttattttgtatgcagagttcaagaagccaacaacatggttgggaatcacttagttaagagtacttggctgcccctgggttcactccctatcaccacataaactgagttattgtggaacacacctacggtcttagcacttgggaggcagaagcaaatagatgaggagtacagggtcatccttggcttcatagtaaaaccaagactggcctgagctcaatgagaacctgtctcataaagaagtagagtccgaaaacaagcacagggctggaggggtgtctgagggaccacagtcctcagagaaatacagaaggcaaacttgtcctctctccatcacattctctctctcctctccacccttcctctccctctctctccctctctctccctctctctgtctctctctgtctctctctctctctctctctctctctctctctctctctctctctctctctctcacacacacacacacacacacacacacacacacacatacacaccctaaattgttattgtaaaattttttcctaataagaaaagcagttgtttctccagaatggatcattttcctgctttacactattgtctactgtgaagtctaatcctccagccttctctgatgacatcctgaagaaagagtgtttatgcgacattcattttgctccagatgctatggtgagagagacagtaacaaaagacagaatacatatatatatagtccatggtttagccaagccctgagagtgcccagaatcacagggaagacagaaattcatgcacacagaacaaacaacagttgcagagtaactgtggggggagagcaataggagctggtctcagtggtccatcgggcatctgcagcttctctgctccttccatcttgttttccaatgttttgctactgtttctgttatgaactggcctctttctcctgatcttcagatatccaaaactgctgtccagacctcctaccaccctcttattgatgtgcagtcttaaaggtactcatgattaaaaatgtgttccatacttgttatccaacaagcactcctatttcataggtattgggcaacaaaataccgattaaaccagtttacacagagttgcagggttacacaaattatccctcagcttcatcccctccttcgtcttcatatacgtttctagactgctaactttatgccagacagtcaaatagtccactgtcagtccagattcagaacattctgctccattttaagactaagcccagaacatgtgccaggtggtagggttctcaagtctaaatcaggaaaggtggcaggaggggtttcctttctctgcctgagcaactgtaccagctcctaccaaattccaaagctttcccctctctctttgaatgagagtttgacagacaggctgctgaatttaccttgtggttttcttgcaagggacagagggaactactctttctgcaaaacgaggcaagtcatgtatctgagccaagggagaatggtgcttgctgtttccaacacacagaagcagacacacctgtccctgtaccagggaaataaaagactgaatagttttggtggaagaaaacaacacaaagaagtttgtctcctccagaatatggacacttgggacttctgagaccttcaaggatgctattctctttctgatctccattttgaattccagattcttacatatttactattaatcatgttaaattacaaatgaaaattgtaagcaaaactgatttttttaatattttcaattttcactctctgtcggcccctctgctatgttgtcaatgtatgtggctgtgtgtacagtttcttttgcacatgtgcacacatatctacagaggtcagctttggctattgctcctcaagcactgtccacttcattgttctcagttaaaatctctcactgatctggaactcatcaagtagaaactaggctgtctggcccatgaaccctggagttctgcttatctctgtctcactggtctggggactacaggcactcatcagaataaggctgagcgagatggttcggttattaaaaccaaaatagtccttgcaaacatgaagacctggggtacattcttagatcccacattggaaaacagtgtgtggagaatgttcaggattattttttcacttagcttctcatcccaggaagaattgaaagtcatgaaaaatactattgcagtcaaaagatgtacttacacacacacacacacacatacacacacacacacacacacacacacacacacacacacacacacacacacaccacagatgcacatttccaagagctggtctttgtttttcctgactgacgtttaatgagagttcctgttgcttcttattttcttcaagtatcccgctgaggagtcttatctgttgggtcttgagctttatcttgggatttagctaaaagaaaccatttggatcatcagagtcaacacgccttgtctttcttcatccttgttttcaattttctttctaaggaattggacgaaaacaggcagaggagtagttaagcaatcccagaactttacatgtcacctggactagagccaggcacatgtaaaggccttctcttgccaaaaacacgccagggacctcttaagcaatcaagaattgctacatgtgtgtaagagctaaacatcttgaacacaatggaaatctgtaatttaattatcctctgttcttgcatgcttaccctctgagcatgctgaccctgggaacatgggactctgggatggaaactgttgaattttcttctcccttctgcaggatcccgaggggaggggtggaaggtttggctgtgtgctgaagattatgtggggaaatgagaaggcgaaatggaaacaacgggaggaaaaagctgctaaacagagtatagactaaaatcagactgctatgaggagaacagaagagagacaaagggaagcacaacaggagtcaacttcatttacttacttggttctcttgagggggggcactgacaataactggtctccaggaaatggagccttcatttgcatgataaataagggatgtgttgagtctataagataagtgctgctgtcagtcctcatcagagaagtttctttgtggggtgggtggtggtgaacccagaaattcacaacttgtcagagcacagattaagtgtcagctgaatccacagccacaaaagggactcttacactctattcccaaggcttagggatcattgcaagagcagaagcagaatgagagccagaaccagaggctggggaggaccagggcaaaactgtgtcccctggacaggacacgactgttgcactcgtgaaatcacaacagctgcacaagacctgggcaagatcaaaccagtctacattctagcatgaaattttaaaaaagcggctagagagagaaagacaccatgcaacagagttcaagtagagggttttttttttaattgggggaaaggattgtaaaaaatgaaaggggagtggggagaccaacctccagggacaggagcagcaggagaaaaagagagagagagagagagagagagagagagagagagagagggacagagagaaacagatggacagagagagggagagaaagaaaaagggggataggaggtgggcagggtccttttaaaagggaacacagtgaatgtgcacaggtggtgctcttagtggcagcagctgagggcgaatcctgtcagaaccccaaggacaggccactacagatgcctgaatactaacaccccccccacacacacacacacactgaggagctatgggcagttgttggctctggggaagggagaagagggtttacatatgcctgtggctcctgtaattattcatgctccagtagatggccccacatccacaagtatagcgacagcctaaattggagccagtgacttgtccaatgaaagctgtttaaaggagagcatgaagttggggagtggggagggaggagtagatgtgggtgttaaggggagaaactaaggattcatatgaccaaaatatgatgtatagaatgctcgaagaactagtgaaaatacgttaaaactccaaagagaagaagggtttctttttgctgtcagcatttgttctacctaaagcgaggtgaaccacctagccctggtgtctctcatatgggactgttacacccaaagcacttagggcatcacccagtgcctgcacctgctatgaaaagagttggagagcatattcccagcagatatactcacattcgtctcagcagcccaggtcagtttccacttaaaaaatgaggagatctcagtaggaaaaaatatgcatagaatgtactgatcttgaacatggaatatttatataatattttgtcatccatggactttgcaggattggatttcatcctgggcacactgttaatatttcaacttctgcacatgctatgtggaaacagaatatgtttagaccagtagatatggcactgtcattcttcctagagacagacccagtgttttcggttaggattactgtgaaagctgtgagccttctgcaggattggtaactttatgcaaatgattgatcccagttaaacccttttaagggcttagtattactggagggtctttagattacaggtggcagaaatctgactcggggtaactcagaaagttcgctggtagagacagaaacaatgtaaggtgtcaaatgaaatgctggataccagctcactacaaaacccaggatgccagcagccctcaaacacaaatacaattcgtgtgtcaccttaccagggcttgatttctgttcctctttgtcattgcctttctccggatgcttctttgtctcttaatttaaatttcatccacaggacaggaaacatggtccctggacactcacaagcaccatcctctatggctctactccttattctcagcacaaatgtctgggtaaagggttctcattggttcatatgtagcagatgcccatgtcataagtgaaaacaacaacaacaacaaaaccctttgaatcagtctagtggaatatctttcctcattctggggatgtcttcaccatttggttattacttggtgtagtataagtaatgcttcataagccattaaggatataaaaaactaatgtgggcaccccagttggactacttgtgagctaaaaccttcagaccagtcatacatctctttcataaaatggaggaaagaggccatgtggtcatgcctgtaacatcagcactggggtggccaaagctaaaggataatgattccaaggtcaatctgagagctatatagcaagtttgagactggccctaggtatataagtaagacatgtctcaagaaacaaaaggctaggggtcacacacacacacacacacacacacacacacacacacacacacataaaattaaaaattttcaagaaacaaaacgggaaaagcatgccctttctcaaaagaaatgtgtgcaacaatatagctaggtcttacagttatactggatgaaagcaactgctggggatgagaacataactaattatttcatgttatgaaactctgggaagagcaaaactgcatcacaattgcagagagccaatcagaggttgtctgggtggcacagcggagggcactaggtgaaaaaggcacaagggggatttctggaaaagtaaaaaggctgtaggcggatcttgacttgggagcaagagggagttacatgatgcatgtattttttgaaagccattggctcatagagttaaaagctgaggagtttatttcctgtgggttacatcttaacagaaattgaatttctatttcaaggtatattttcctcaaaagtttaaggttagcagccaatgaaagagcccagcatcgatgcactttttaaacataaagtgatgtgcacccattgccctctaattctgactagcgatgcctggtggtttgctggcttagatcaagacgctaacataactaaccaaggatcaaattctacattcttgatcactctgcccactgagcatgccttctctttgctcttttcattacaggagttctgttaggtaagtccagaggatatggattttaaagttataccaacccttggtatgactttccacatttgctctacagggaagcacaatttgtgacagggacaaagtctacataccagataagctaccactaagaaatcctccctctgcagtgaatcagaggttccaagctgggcaagcctagctcactgtagcttccagatatttactgctgcttaataaatggcctcaagacatagggattaagacagcatgatttgttatttctcatggctctgtaggttggctggactcagttgggccctttccagtgaagtcagctggggtcagccacatggctgaattcagctaggagctcagcaagggctggaacacccaagatcatagacacacatatttggcatctcagttaaagcggctggaatgactgggaacctattgggcctttctaactccacaagcatggtctaacacaaacttcattcaatgacacagggatacaaactggattagaacagcaaatcttcttcaagtctggcctgagaaatcccagaacattgcttctgctgcattgtgttagaacaattcataaagtcatctataagtcagaaggcagggaatcagcctgcatctggatgcaatactccatttgtgtaaggcatgggaaatgatggaagacatcttcatcaacaacttccattttcctccctgtgcttcttatgaacaattaaataaaaggtcagtcacctaaacaaacagctgaagatctccaaatgtgacatccaggaaagggagtcttaagaatctaccgtgtgctgaatacctaatcgagggacactgaagaaaaacacccttaaccggggcatggatgggctgagctgatgaggtgagtcttgctttcatcaaatcacatggagaagagttcccagctctgttactacacttggacaaccaagtagtggctcctctggtgtgtcttcctgctttcagaggagactgagaaacagaagaagtgaatagctaaccacgcaaactcaggcaaaattttgtgaaagatgaagacagttcctttttattctattaaccattgtgctatagtcatctgcacgttccattgcatgcaaagaagcacttgctgctgcatctcaggcccacaggaatgtcccttcacctacattctccttttgtcgaatgacgcttcagaggtgcttgcccgttgtcaccagcctaaagccacagctcagactggtttaattctggagaaatttaggaccaggaagagggaggaagcctcttagaacatatctgaaaaacaaaagtttgagggtccctatacttcaaacacatagtgcccttgttaggggtgtcagccttcctgagtcaccactggccacttctgccaggtctcttccaacatgttggttctttggaaccaggtgtacttttcccttttacgttctttctcaagatcagatcttgatccaatctcttaaggatcgagtgaatcacaaaagggtgttagagactggcaacagctgtgttaccttcagggacattgcttttgactctcaaagcagaaacaaagaagcccagagtcatgaagctcaaatagcattgagcagaggcaggaggacaatgtttcaaggcccagcttccaccccggctccctccagtcttacccacgtagcctgaatctcacatcaaatacatccgactgatgcaaacgctccacttggtttctcctggaaactttcttttctaaagcttggtgaatgggtggcaagtggcaatcagaagagagcacttaattccttgtggaagcgggccatcgaaacgccctcctttgcttgagtcagaggcctctctgcagaacgctgggttctgggaattgatcaaatccaagagcacgagggggagatgaggtcaaggtcactgcaacactgcatggctgggattcagctaacggttggtgtgtgggtttcttttaacgatgtgcagtagactaataagcagaacgcgcgcggtgtttggaaagtgaatgaagcctagtcctggaagactcttgggtggagtgtgttaaccctctcctgagccagaaatggtacctcggaggtttctcgtggaaattgtaatatttgtggactctaaaatagagaaattggccaaatctcaggagctaaatgtgagtgactcatctgggttaggtacctcccaggccatataaacaactcttggccataaccagtactgcaagtgtccttgggcgagctctgacaatttggtttcaaatgtcggtgaccatggcagagttaactggactctctcttcctccttggttataaaactaatgatgagtaagagtattttcatcagatgtgacagcaggggctccagagccatctggacggcatgcggcacatagctctgtattcaagttcccccatgtgtttattggacatgtgtgtaattacactagtaacactaagtgctttgctcattatagattcagtagctgggcagacatcccgaaaattatactgaaatgacacccatctcccacccactccccgggtgaatcatagggttcacatcattgttacagcaactgaatcgctaatctctcccttcatgatgtgattgtacttttaaaaggtatcgtgctgccagtgagaggaagagacccaacatcacggagactgttagggaaagggtagtttaacctctctgtgggctgggaaccaagatttcaagtgagtgatccactgagctccaattcccaacagctgagaagaaagactaacctacctgagcactagttgtatatggtccaggagggagcagttgggtgtgcatgctaagggacccaggagtttcattcccttaccttagtcaatgtcctctgtgtattctggatggctgcttggcatgcgttttcatgaacgaatatgaggtaggcaaagaccatgatgcatggagtacaaactcacaggcagaggcagcagcagttttgagggagcgtctcagtagagatgtttcaaaaggaatctacccaacccttgaagtgactccaccaatgtctggtagtaacagcaatgcattgtacattccctgtgaaatgttcagatattttcaagagtcactcaaagggcagtctacagcacagatacagattcttggagcaacttccttcaataggggcaagtcccatctgttcttttaggttaagaaaaataaaatcagccatgtcaatcaataaggaagtcgggatacataagcactatgcttgtgaactaatttcaagaccagtgaaaatgttactcaataaaatctgactatattgtctgtgtccagaacaccagtatctttggttatgatgaaaacaacaaagaatgaaacagtcaaacagtgaggtgggtgacaaagaaagagagaagggctaaagagtggggtgcagccctaatagccagtgttgtaatttaagaaaagctcgagaaagatgccatgtgacggggtacaagcagaggggtttttattagggaaagagatcctaaaaatgggggaaggaagcggagagaccagcctccagagacagaagcagcaacagagagagagaagaaagagggggaggcagagagggagggagaggtggaacagacagcgagagggagagaaagaaatagagagagagagaagggaggcgggcagggcgcttttaaaagagaacatagtgactgttcataggtggtgctcttagtggctgcagctgagggtgtgtcctgtcagaaccccaagggcagaccagtgcagatgcctgaataggtatagtaagtggtggggggagaccaaatggggtgggtctcttgctcctgggatatcaggatggagtgaaatgaggtcatgttgtatcaataaagtcagattctgcccatgaattgttccccaggcctataatcccagcattcgggaggctgaaataggagatcaggagttcaagaccaacctgggctaaacagtgagaccctttctcaaaacagaaaatgaatacatgcatatatacatgaagccataaacatgtttattcactcgtgtgtacatgcctgcaatcatactcacatgcatgctcatatgcacacacaaagtgagactcaactcattccctcggatctgtgactacttgtaatcttttgtcagaggcaagtgggaaggaatggtgggctttctgagaactgatgccaagtgctctttttgttctttgaagtttctcctgatctgtgaaagactcccattttcctccttatctccagaagccgggagaccttgtccaccaaaaggctgaaaaactcatcagagggagcagtgagggtgctgttgaagctttctgtgcctccattttcacagtgggtataaatagaccgcattttaaaaggcaagcttccccctcctccaaaaaaccggaagggaaaaaaatagagaagctaaaaataaacaactaagacggaaaagtccctgtaatttcagctttcgaacgcaaagctgagcaatcaaggagagtatttttactcccttgtcaatgtttttcctggaactgcatgtaaacatcgcgtgttcggatctgaatggcgcgtgcctcataggcctaggtgtctctgaccacagaataactttatcccaaagaaacagagcagacaggaactctgtggtctcagcattccatgcaaagaaataaatacatgtatatagatttattaaaaaaacaaaaaaggttcagtgttacaggaaggacaactagggtccttttgagaagtggttttcgttttgttttgtttttcctcgtggaatccttcatgacaacatcttcgtgtagtcaaagaataatcttgttctcctgggctcatctgagtatattttcttactccccatttagtgtgagatgcccaagatccacgtgagaaagtcttgagagcttgtcctgctgaaaactactgagttttcatttatttatcctgtgggcagaaaaactcaaccagctttgtgtctcttctgaccttatggccaagagaagcagggaatccaaatgctgaactgtctgctaaagggggaaacatgatcttaggggcttctaagcacacatgggcctccagttctagctgcctgggggatctttgtaggtttttgtccaaggctctgctgttgaaggggaacagaatgtggttttgctgggccaatgcctcagtctctcgctggtacttgcctctgctggctgattcattaggtcctgctgatctctgtgcctgagggaaatccatcactagactaacaggccatctccctcccgttttcccaccctgtaggtctgtgattatttgacactgggtggaaagtaggtgctgggaagtgtcaagggaaacaaacagcatgttggatggtcatacatcaccccaaggccacagatgctgtgtgtgctttcctgtcagacttgactaataggaccatggtgtggacctggcctccatgtagccagcaaacctcacagggaagacggcccattctctcttccaaaagggcccctcgtgggctgacatttccctgtatttgattgcctctgagtaaaacaatttgaaagatcacttggacaatagaagctcataattttaccccttggggaagaatatttccccccgaggggaaaaaaatactttactctttgagactgcttgataactccagatttcattaacatgttcaagcttgcatcaaaaaaaagtagacattacagcactgctttgttttggttttgtttgggggattttcagacaagattttcctttatagcgtaggctagatttcaacattcattcctcctgattcagctccaactagtacttatatgactggcatgtgacacacacctggctgggtgaaacatacgcaggtggtttactaaggctgcatattggtgaaccctgtaaagattgtacattaggtcagtacagattttagtcttccctctcaaagaaaggttctacctaaaggcaaatcctatttcctgtgatgataacttctcacatttgtttgtttctaactctttagcaaggttttctgggataccttctgtgaaattacctaaaagagaacttaggcaatgtatggaaaaatatgtttgacctccaagacccattcttagaattattaattcattttttatcttattttgttataaatatcaaataacatagtccatgttgtctgcatgaggtaagtcctggccttagggcttaccacattagagaattacacttggaaagccatggggtttatgttcttaggaaacgcaaagagaactaagagcctataaaaatggggactagaacaataaatgacattagctggagaggcagctgcacagcaaagtggaacaggttggtcaagagatacaaaattgtacttaggagaacataattccagggttccactgaactgtgggacgactagaagtgatgactgcctttaccagcctagctaaaggaaagactatgtgttccaatgggaaggaagaataagtgttcaacattgatagagttattctgtaaggtagtcatggcttcaaactttatattatatcctatacagctagctatacaattactatgcataatttttttaaatagaagggagaattgagacccaatagcaaaaggaaaatgatcttgccttgtccacagatgctcctataaactcccagtacactgttgagcatcagttggcacacacaggcaagctctactttcaggcttattctcccacccactgctgcctcccagaacaagaccaggtcaaatgtgtagccttacttagtctgtacctttttaaagacttccccataccttctattaaaatatgaggcatcctatgggtctaaagtatattttcgtgtctgtgggacttcctggagttttcagtgggactctacctggccatcttggagaatagtttggataaaaatcctaaatggtgattctatggtcgttttgaagattgtgacaaagcttggcactggggtttaggattagttgaagaaaatgaattccttgtggaggggcatgagattcactcttttctcttcctggggactccagtgtgtagccctggggtggccttatccatgttaggagtgtctacctgcatagcagctgagagccagagaatgcctgccactgctcagaagaaaagatggtagacgaggtaatctccaagaacaaagaccccagtcacttctaatctccaagaacacagaccccagtcacttcatcactcttgcctgagggtctgggatgaactgtgtttcttcataccccgtctaattttatgaagtcactcttccccacggcagctcactaactcaccacctctcctcagataaggccttgccaacagaaataacatttagagactgctctgaggcctgctgactgtgggagtccccaactcccaggacatacacacagcacacagacatgcatccacacagttcactgtgatcctaaagcaggagacccagcctcagagggcacaaaagcaccaggatgacctggcatgcagatgtttatctctgcaacaggaacaactgcacatttgttccagcatctgccagaaaaaagccaatggtgtagaaagaatccacttcagaatacttactacacacactgtccccacttcagctacggttctgctttgcattgtttctgttaacccatgctcaaccagaatatggagatagtagatttaaaactcctgaaattttcagaaataaagaacttgtagctttttaaaactgcacctcaaagcatactgcagtggtatagctatgtccaccaaagacatgagtcagtcgcccctttctccagagtatccatgttgcataaacagcatcccgattagttacctagaagctaccctggttgtgaaaccaactacattgcaggcattgtcctcaagtaacccttataccatagcctgggccacttattcttaacatgtggctgttgcatcattaaatagcatctcacacacaaaaaaggtaaggacagaacgataagaaattctgagatagggatggagaaaggagagagagagagaggggagagagagagagagagagagagagagagagagagagagagagagagagagcatccacagaatgtttacagcctgatgttaagaagtcctgttttgttattggtttttatttatgacttactatgtcaacttacaggttaaaactcattataaatatatacaaaaaacataaaatagtctatgtagagtttatactgtgaagattcagactaccagcaaaggtttgataatggatccgcatagatgacagggactagtgttcaacaggttacctcccttcaagtttgagggtcaaggagaaaagaaaattgcaaattttaatataaaatggagacacaaagccaaaaggatctaagcatcaaagtgtctaagggataagcatcatagtgtctaagggataaggagagactggagtttttgaggcccatttttgtagtaaaccctgttctgtggtacatatgagtgaggaagtttaatccacaaagacttacactggacaagtggcaaataatgaatcattgggatccatatcagggccacaggggcagaagggaccaaatctaagtcactgttgctactagcctgtttctctaaggcacgaaatgacatgtccctgtcctttgaacatgacctggtgtgcccgtgtgtgagtgtgtgcccatcatgggtgtgaggtggagaatgaagcaaagccagaatgtgtttccctttgggctcagattccatctgcagatacaattatttgtttaacattgtcacaccatattaagttacattctgtggtttattagcaaaaacgtgctttttaaacttcactgtcccaagcaatgatcgctcctagacaggtttcattactgagaaatgacacagacatttgttatactctcagacaataaaatattacccagattgaataccttcatggaatattaaacagaatgaatgctttccctttctatgtttatcatatcatattaaaagtgaaggcatggtgcaatgttttctttcccaatggacaagacattgggggaaaatgagtttcatttgccttgcacaccactggctttacttagtaatgtccaaggtctccaagggttgctagaatgtcatttcaagcattcatcttctcaagggtcactatgaggaagaaacatcaaaaaagtctcctacagaaatgccatttgtcccaacccgaaactcagttagtttcaggcattaatggaaggatcaaagagcccatttaaaaaaaaaaaaaaaaaaacagcttagaggaaagaggttctatttgacttaaaatttcaggtcacagtccatcattattgggaagtcaaggcaagaagttgaagcagccaatcacaacacatccaaaagcagaaagaaaataaatgaatgtatgcttagaagtcatcatcccttccctctctagtacagtccaggatgcaagcctagggaatggtataacccacaataggctgggtgacacttcatcaatccaacctatttttaaaatccctcaaaggtcttctcaaagaccaacctgatctagataatcccttatagagactctcttctcaggtgattctagattgtgtcaagttgataaaactagccctcataggaccacaagaaatacatattttacctgctatcaaagagcattatctatagtaagtgagagatgacgtagtcacgcaatggtttgtggagatccacaagggcacagaaacatacagtcattacagaagggtattctgacactattgacttggtctataaaaaaacgctaactatagaaaataataaattgggctgtgaacttctccctatgcattgcacataagtgggatttctcagggctatgctagagattgagtcaagtctctattgtgtttgtttttccatctctctcaccgaaaaccaacattaaaccaatggggactttggtaaacaccaaaattcctggagatggcaactctgtgaaggttcagacatggccatggaaaacatagcctaaaccctcaaaacagccacagtcagttttacacccatcttcgttagtactttatttcaactcagacctctaccttaattatgctatagcgatttttctaacagttatcaggagagaaagtatttgtcctatctacttggaagggtgtttgggagcataagacaaaattacatatgaatccatttaaggagcaaagaattaagctcccaagagggccatgcacagggatcttaaggctttgctgtccctaacctttggtcactaaaattcatttcacttttgaatttgtctttggaagggaagtcggctaggacactggagtgggaatggggcaaatgtgtcaggtacggctgcatggatgcatacacaggccctctagaatggtgacaatgccagaagcatcgcctgtgtgatgcctggtacatgtctaacaggcttgggtatcggggttgaattcttttcttccccatgatgggcatttacaatgcctctgctgggtcccccagtatgataacgggccatcttattgacagcttaggttagggcttggtaaatcagaggatggggatgcagtttcctgctataaattctcagacaaaactgttttcctcccaagagctcacacaggaaaagactaggttctttgccaactccttcttgtgggcatttctccctggtccccatttcacaaaagtgagacactttctagcacgccaactcccaccttgtctagacagggagccttgtgccctgggctccatgcttacttctcctaaatgtccaaactggtattatgttcaaaactgttcagcagcagcagaggttgtcagactcagtgtctcatcaccttatggttttttccttgtcagtttgggccatgctaaccgcaaggtgccacatgcagcaaagtcaatgctgatactgatgacattttgtgcagctttttaaaagtactatttggcaggaggtggtcttattcggcacactgccaaaagaggaaaaaaagaactcccgttttctgatatgtaaaacgatttattttaattagctccatcttatgctacagttcactccttcaatctaccacttgatacttggaggaccacaggcaaacctcacagtgcaagatgctaaagataccacagaggataagacaaggctcctgccaataaagttcccagattagctgcacgagaatgcagcatcagaaatataatctaaataaaatgtagtgatgcaaccacagagtaatgcctggggctgcacacgggagtggtttatcaagtagctgccatgagaatttcacagtgtgttatggaaagagagcaagcagaatttgaactgttgtttggaggcaggaggtggaacagggatgctgatgctggagcacagaacagctacagaacaaagtacatgtactaggatggagggggaaaggacacagtgggaatacaagctgacttctaatgagacatctcgattctagggataccttatgaaatatagttaacagatccacaaagatagaaattaaatatcttccaggtttttcttttgttttctttttcttttttttttggtttttttttttgtttttttgttttgttttgttttgttttgtttttgtttttcgagacagggtttctctgtgtagctttggagcctatcctagcactcactctggagaccaggctggccttgaactcacagagatccacctgcctctgcttcctgagtgctgggattaaaggtgtgcgccaccaatgcccagcactcttccaggtttttctgatgcaaacacttttctttaacataacccaaagagacttatttcatttcagatatttctttattctttattacatttcaatatatacagttcatatttacatacaatatatatttacaaatatatgtttagatatttatgtttagatttatagattatataaatatatatttgtaaatataacatctatttacaagtataatatatatatatatatatatatatatgtactaaaacattcaaaaataggatggattttcaacagctggatcttaaaagtgtccagccaattacagatcattctcaaagagctacatagcaccaacagaaagaaatctgggggaaacttccccggcattggcaagccccttagtcaggagaagtatgcagcattttctttatcagctgctttgatatggccttccatccaaattgcataaagactttgatctccaagaaaccctgttgcgacacttactcacagaacagccaattctcaatctcagtgcaagcctccaagtttagctaggcagttgtggtgtgctcctttaatcccagcactggggagacagaagcaggtgggtctctatgcgttcaaggccagcctggtttacaacatgagttctaggttggccagggctatgtaggaacaaccagcctcaaaattaaaagcacaaaactttgcttcaactctgccctgagactcacagcatttcctgcttatcctggtggattctctacatggtttagcaaaatacccaagattgagtaatttacatttaaaaaccagattgtttaactaatggtcctggaggctggaaaagccaagaacatgctaccagcattgggtggggaattcaagctacccaataaagtggcggaaggtgtcatacagtatgttggagcaagaatttgtgtgattagcctcaccctttgtaaagccactggtccccttgtgggacccacaccctggtaatcttatctaaaagccccaccaggagataccatccacacatggacctggagatgaagttggggtgcagatgtcagaaaggacattcaagccgtggtgtttctttgggaagctgtaagcttcctggattcaaatgcaattgggctatagcttaaagtaaaacactcttctattcagatgacatcctccatgacagtgggtgagaagagaattttctgagttccatctcactcaagtgtcctctttagatgtgtctttgcacttttcatcattctatggatagtcctttaaacaaggattgtcttatccttgggacctggctgtgttagcttggcattctgctcagcttttgtacccactgctgttggggtgcaaatctactatggaatgactggctatggcatagaaacagaaaaccccatttaaatatgcaactttatgcaaaccacagtctattatgcaaagtataagccaataactactcaattataaactacatgccgattgttgttcattttatgtaattctctcctcttcttcaaaaaatctcatgttaaagtttatatgtatgcaatctcttttcctatagctttgtgtcaataacaatgtacactaaaattgtcagaatttctctcaacacaatagaaattccaacttgtcattttctatcaatgtgaacaccaaattactttgcttataaattatgggaatgaacatacattgtgagagtctcaactttggagggatctgtgacggttataacaggatagcatttgacgcttgcgatttatataaagatatttcatcataggcattataaactgtatgtgccatttaatcttaagccccaagaactgttcccttctctgggtgaaaattctctactccagaaaaaaagcactggacaatgtaaaggaccatactcagccactgcaagacttcacaattactctgatctttttaaattgttttatttacatgcgtgttcatgtgcatggattcaggtgagcgtacaccacggtgcacatgtgcagattggagaagaactttcaggagtccattttctctttctaactcatctctgaggtagtctgtcttgctgtttctctcctgtatattccaagctaatggctactggcttctggctgattctcctgcctccatctcccatcaccgcaggagtgccgggattgtagacacaggaacatgctttatttaacaagggtttccaagatcaaacttgggtgatcatgcttgctcagcaagtggtttatctgcagagccatctcactgttccttttattcatgcccaactcccaaagttttgttaattagcacaatgcatgacacaatcaaagagtcggtatttacaatgattcatttcacatttggacccttattagtgaaattaaaatttatccacgagtcagggattgggtagaataatttataaagttaaaggtgtttaagacactagactggaaattgtatgaagtaatttggattcaatcctcactctttgatgaattgctcataagacccagccaactccatattagacctaagggatggtggtgcggatatttttttaatgggtaaaataatgactctctatggtataaaattaacatgtatcaaagactttatttgactcattaattaatgaggaaaccagaaaagaagctacaactgtttcgaggaaaccccagcgaccagacaagacatgagcctgtagcagtgctgagatggatttctgcatcagggacagcactggttccttgcactgtggaagaagaaagccggttctcactagaaaggactcatttgcatgtgtggagacaagacttgcatgcatcactcaacaggcagacatcagggtcatggctataccacatgttaatctgcgtgtaaaaaatgtaaaataattaaaagacaatgaaagaaatcatctcccagaaagcctaatcatcagaggtgtccccctaaccaatgtaaccatcctcccaaaatccaggctcggcagagacaggcagaaatgtgactagagaaaaagaagtgatgtgatggctgagaacaggacctgtctgcttagggttccattggcctccctgtccatcctggagtgggagccctccagaataaggatgtgatgggggtgttcttctgtatatatgtttctcttattggaacactgattggccaggcaggatgtataggtggaactacaaaaagaaggcaaaggaagagggggcagaaggagacgccatgctgctgaaggagtaacatgtcggattacgggtaagcctcagccttgtggcaatatatagattagtagaaaacgggttgataagtaagacggacctagccaataagaagccctagccatcagccaacgattttataattaatatagcatctgtgtgtttatttgggggtgaatcatcttagggaccaggctggaaagaaacaccagcaacaatgatcagagtagaggggatggcatggtaattctaggatttatggctgtttgggggaatagggcttctaatgcttccactcaacttagagaataataatgcttgttttctatggctaattttggagatgagaaggagaaggccagagagatttctgatgcctccaacctcctttagctcacagtactcagcatgccgagtcccacactgtgggctctcctcctcggagccccaacatagcttaagtaatgaatggcactcttctatttgtgcataaaggtatgtttggaaatgcctgcatctgtgatgtaaactccagacctatgccttcaccacagtgttgacggctatagtggaacggtaatctgtaagactgtaaagatttggagtccttaacatttctgaaactaagagttgtgcatacctgagtcagcaggtgaattgcaacaggcagacatcaatatcacagctaagctttgtcttgccttaggagagggttatttacctgctttactgaaagccagaagtagcatttgtaaaagattataattgcccaagagtggagtttagcaccagtaacaaaccagtgtgggtgtttatactttgtccctggaagtactgtggtatgggtgtgaccaactcagcttaaagtcaaggaaccaaaagtacaaaatgtcttttttacttgttcccaccttctcccctccaacaaactcaggtctctctgtccttttatgctgtgtcttatggggtcacagtaggaagaaggggtcaggtgtagaaattgtagctctatataaatcagtatttggggctcatcttgagtaagactatctttggactctaagataatacctaggcagcaagtacatcaaggtataaacttgatgactgcatgcaagcttcagtaggcacaggcagcttgcttggagaattagaatttccacatatctccacatgaactcttgaaatctgctctgcaaaggaggcaagacaaacgtgacaacaaatggtttatcttttccaataattgcattttcaactgtaatcctatatacttcccctcctaaacaaagtctcatttcaaaccaaatgtttctccatgagcacagagcaggcaaatgggagcacacatgtgtacatggagatagtcaacagtttcatggttttgaaaagttcccattagcacgccacactcatggcctcctggccatttgactatgtagacgggaaagtggctgaggactaggtgcttgtcttccgaggtgcttcaagtctcactccgttgtagaatcagattttttttgagagacagagaggcagcggctgagagacagagagacagaggccaagactgagagacagaactgtacactgtagcgcatctcacatgtcagtaacagaacaatgtgtttctggacagcagaagggaatttacctccacactcttctaagaggctctcatggaaccctctgagtctctaaagtcactccacggtcaaaacattttatttttgaagaaactttaaagcagctaatgtgaccaacaatatttatgaatgatcacattacaaagggctcagctattctagtgacaggatgttatcgcaccttgcctgggatttctgttcatccataagagaacatgttattccttgatggggaggggctcaagtctgctaatgtcattttacaggaaaccagatagcagcacaacacaggagtcatctggtggaagaccatgacgttgaggagggctgcagcagcctgagtgggtgaagggtagaccacaagaagtcagggatgtggccagcattttgcagttctgtttcctaagcctgtgtctatccctccttcttccttatcctgaaaatggaggccagttcaagactacattccccaggctcctcagccactaggtagacatagaatgaggttctactagctagaggcataggcctgagatttcaagccattgaggatatgtccatgcagagatcctactgaaaagccattgggatgtgttcaatcaagaagccatggtaggagtcaaatggcaaggtcagtgtcaacagccaggttcatgggtacccagagacagctaaagtagctagcctcctgatgcattggccaatggtcattatcaactgttcaagccacagcaagcaggcagagtctcaaaactgacaagtgtcagagttaggagtgatacccttcaccctgtatctccctcctcatcataaacttgagaggaccagagaagctgcatggcagaaaatgacaaaaacagagatatttggtatggaaatataaaatcaagaccaacaaaaagtcatgaatggccttgagcactagagctgcctccagctgacctagtggccctaatacttctaagcttccatttcctttctgtaaaatgcaggtccaatgaggctagaattcaatgctgctgtagctcaagatctatcacttttgatgtaaaaggctagttaaaacctagtcattttgatcactggaaacacaggatgagaaggaagcacactctaacagtgttctcatgtccaaaggcacattaatctgtagacaaactacccaagagctgagaaaatctaggagacaatgagaatgtaaaaactaccccacatggacaaaaatacaatggatcataatactactggctggcctaagaaccccactgagcatgtgatcaggtttcctttggtcctcctgggacatgtaagcctgggaaaggactctgtttccagtttcctgccatcctccttgcagtctggccctgtagacaagatccaggggttcccactcacccttccaggggttgagcttggctccaagctccatcttcatgtttcagggtggtgagcaacagttccaggttcgaactcactgtggaagggaaacaaactgagacagaagaccagaagtggctccttggggatctttgtctggtagttaatgtcactaataatggggagcaggcaatcttaggccaggcatccccagttctgcatgccatcaaattccataaggactttcaagatggagatgtcatccccaacatacagtagtatggataggaaaaagactagaacttgctagttatgggtcttcaggttccaaccatgaagaccttttccatttctgttaatagcttaaaatgaaaactgtatttgtagttgacctgatgatcagtagaattgcatatgggcaaacaaagaagggtgaagaagtgtcttagcctgtaatatttttgcattgtaagtttgaggacacaatttcaatccctagaattcctgtagaaaactgaatgtagtggcacatgcttgtaatgtcatccctgatggaggagacaggtagacatctgggcttgagacccagctatccttgtcagatcaacaagcttgagaccaatggagactctctgacccaacaaaaatgtggggtggcacccaaggaatgacgtccaaagcagaatgactgtgacctccacagagcatgtacacacatgtatacaaagcagcacctgcacacatgcatacatacacacagagggagacagagacagagagagaattccatctacagagacatcagccaggtagatttttaatgtgttttatgtatcacttcattaggttattcattaatgattaggagttgaccaaaaacatacaacaggtcaaatcaagcacttacaaaacagagatcacatggaccacccaggaactacccaacatactagcatccatgcacaccttggtactgagacgttaccgagatagtttaaaatactttgaaaacattcctatatattttaatagagccagacagactaagtctaaaggtcacaacaaatggacaaactatgaaaagattaggtaaacaagaagcccacttttgctgaagtctgtagggacttttctgttcaggttgctaattacttcctattttcatgggcagcattttgaagaagccatggatcttgtgtatctgaggaagcgtttcctcatcccttcacaactgtggaccaatgtgactccacctttggatggaccattttagagcccatcaaacactcttaaagtagaaattacaacatcaagcaatttctttttctctttctttctctctctctctctctctctctctctctctctctctctctctctctctcttttttggacagggtttctctggttagctttagggcctgttctggaactcactctgtagaaagccccaaacttccaaaatcaagtgacttagaaggtactcagcatgaataggacagcaaaggcaaagcacagggtggtagtggtgtctattcctccctggatctagagagtttagttcctctgaatactaaacagtgattatggacatccagtgccttggcaggaagaacttagttctgtatgagctggcctaagcagcccccctgatggggtatcccaatccgtaaccaccttatccatgaataatcactaagggagtaaaacatgatgtctggttttcaagcgcaaaacttaattaagtggtgaacacacagaaattgatggagaaattctccatatgccagactttttgacataaaaatattttattggcttatatgttcaatttgttttctcttgagtttgtttataattgatttatcttcaaacacatgcttaataaagtcaggatacgaaccagtatgctaataaaagtattgtcatgaaaataatgaaaatatccttctcaaaattatcatagcttttcaaactttttggcaacatatatatatatatatatatatatatatatatatatatatatatgatgttatatatgatgtaacaatattagatcatatgtgatctaataatcaattcgcttctattaccttctctgctcccctcatcccactgaattccttcttcctctcaaatagcatcttctactttcataatttcttggttactagctttcattctgcacggtgctgccttgggatatcatttctgaagaaggggcatgtgcagtcctcagcaacagtagttacagcagtcagtgtgttttctcgaggcttcctggagttgtaagccgttcactgaaagcatcccttacatgctcgacttcctccttctagccagctggtagactgctagcaaagattccactgtgtgagcacatggaaaacttggcctgcttatctacctagaagcagccccatccaaagtgaagtcttaaagctgagctcctgacagggtaccttttagaatcctggtgatctctctagtgtttttaatatgtaaaaattcattcataggggctggagagtgggctcagtgattaagggtgcttgctgctcttgtagagagttcagtccccagacccacaagagcagctctcaaccatctgtaacttcagctccatggtatactacactctcttttggcctctgcaggcacccattcatagagatgcaaacacattaataaaaaaggaaataaaattatctactctcattcatgcatgtactctgctgaggtaactgttaccacgatgcacagctatagtctaggcttttggttttattttgaggcagacgcttttaatttataaattcattaaaatccaaaacctgcttctgcaaggaagtaagatttctttagcaacaaaattgcttgctgagtcaaaatgacattaaaaaatctccctaactttttttttacttaaaagacaagagaaattgaggtatggaaattttgtctccattaaagacatttttattttacaaggactccactaataagtgacttgatggaaaaataaaacaaaacaaacaacaataacaaaacaaagttctcaaagggcagttcaagaggccagatgtggtccaagtaggtgggaggaatgctgtggtgatattctttttatgatctaataaatattgcctagatttcagaatgcaaagctaaccacagccatagaagctgggcagtggtggcacacactttaatcccaggacttaggagacagaggcagatggatctctgtgagttcaagaccacctagggctacatgagagtgaatcagtctaaaagagaaacagagctcacatatttaatcccagcactagagagatatataagacagaagcaaggtctcagttctggcattcagtcttcggcaattagtctccagccacattgaggacagagtcacttcagccttggtagaggtgagaactctctggtgacttggctgctttgcctttctgatcttcagcttgaaccccaatatctgtctctgggtgtttattatccatgctacagagagctagcactgggcagctgccctactatgttgtccttgagaacccatgtggggataaagaggtggcttaattccaaggataaggtaccccaaggacttaaatgactctagacataagtgccccttcaaactctgttcaaccctgctagaacaacaccaacatgttaaactattcctggcagatctgtagcagtgacctatttgtccattccaacctgcttgaccatttctgaagttctaatgatgggagagaaatgaacgtggatggacactatcatcacttccaagtgtcattttagtagtgatgtcatgagtttccattgagtgttgttattttgtgttgatatataactcgcatgccattcaaaactttcatcaactcaactaatgttctcaccctatggcctgtgaactctcaatgcagccacaaaggttttacacattcccagaaatctgtgtgtacatttgcctcttcttccaggcatatttccttgagatggctttcttatgcacatcacaaaagacacaaaaactcagcttctcccgccacttccccatgagcttccatgagcacagtaggttgtgttaaagatctagggaccacatagaagagtatggaaaggggctctttcctgtgctgctgctccctctctcctctgacttgctttctctggctcttacgatccccacccactaagctctgcatgtctctttggaaacttctaaatttgcatgtcaaaatccacacacatgttcactttggatgtgatacagagatctggaattggttaaggagtttatttagaaacacaaaatctcatttaaaagtgaaactataaaaataaataagaaaactgacacttgttaataaagagagtgttcccagtgacaataaaatatacctcattctgagttagctcattaaatgatacaaataaaagaaactagaattgacctggctatctctaaaaccaagaggaaatagcccaggcagtaaaactatttagaaccattctcatcaatgcaataaatacatcatatagggtcactaaacatagcccctatgtgttcttagtcaacctctgcttagcttttgtgaattttttccctctcccttatagagcatctaatataagtaggttcaacaacaagtaaaccagtcagggttccccttgtattccttcctccaaaccaaaacataccctcctgaagggaaaaggaagcttcagaagattcacaaagtactggagacttgtaaggcccaggaacatgctgaagtataaatgattcttcccaaagattatatgggcactagaaattgctggagagaggagactgtccaacaagcagagctgcaagtaagttgttcaagagagctctgaagggatatggctttcctgagtcacacccatgctgaggcagaccccactctttcagtaagttagactgaggtggagtctccaagttagactgaggtagagtctctaagttgactgaggtggagtctctaagttgactgaggaggagtctctaagttagactgagatggagtctctaagttgactgaggtggagtctctaagttgactgaggaggagtctctaagttagactgagatggagtctctaagttgactgaggtggagtctctaagttagactgaggtggagtctctaagttagactgagatggagtctctaagttgactgaggtggagtctctaagttagactgaggtggagtctctaagttagactgaggtggagtctctaagttgactgaggtggagtctctaagttagactgaggtggagtctctaagttgactgagatggagtctctaagttgactgaggtggagtctctaagttagactgaggtggagtctctaagttagactgaggtggagtctctaagttgactgaggtggagtctctaagttagactgaggtggagtctctaagttgactgagatggagtctctaagttagactgaggaggagtctgtaatttagactgaggtggagtctctaagttagactgaggtggagtctctaagttgactgagatggagtctctaagttagactgaggaggagtctgtaatttagactgaggtggagtctctaagttagactgaggtggagtctctaagttagactgaggtggagtctctaagttggctgaggtggagtctctaagttgactgaggaggagtctctaagttagactgaggtggagtctctaagttagactgaggtggagtctctaagttgactgaggtggagtctctaagttgactgaggaggagtctctaagttagacagaggtggagtctctaagttgactgaggtggagtctctaagttgactgaggtggagtctctaagttgactgaggaggagtctctaagttagactgaggtggagtctctaagttgactgaggtggagtctctaagttgactgaggtggagtctctaagttgactgaggaggagtctctaagttgactgaggtggagtctctaagttgactgaggaggagtctctaagttagactgcggaggagtctctaagttgactgaggtggagtctctaagttagactgaggtggagtctctaagttgactgaggtggagtctctaagttgactgaggaggagtctctaagttgactgaggtggagtctctaagttgactgaggaggagtctctaagttagactgcggaggagtctctaagttgactgaggtggagtctctaagttgactgaggtggagtctctaagttgactgaggtggagtctctaagttgactgaggaggagtctctaagttgactgaggtggagtctctaagttgactgaggaggagtctctaagttagactgaggaggagtctctaagttgactgaggtggagtctctaagttgactgaggtggagtctctaagttagactgaggtggagtctctaagttagacagaggtggagtctctaagttagactgaggtggagtctctaagttggctgaggtggagtctctaagttggctgaggtggagtctctaagttgactgaggtggagtctcttcactggtctgtcataagcgaagtcaatacattttttgttcacatctaccctgaaacaatccatgtccccatggagcttacatgttgggaagagagaagaatgacaaacttgtaggcaggtgcacaaatgaggtcatgcacaggctagtagaagtaagaaagtagggtaatgggattgactgggtcaaatttaaataaggatcaaggaacaatgtctagaaaggagcctatggagcaacagttggcaaggaaaaggcacggaggaaagaactccaatgcccagctaccccgagagcaacagatgttggctggtggaaggtcaggaggagatcagggatggtggaaggtgaaaccggagacatcatacaggctgagaccacacagagtcttgtgcatggtggtgagcaagttagactgtattaccatcaccactacatgtcagcctccatctgctgtaaggggccgtttcctgcattataatggtgcctgaagacaccaagatgtaaattacttcacaggcgctgggtaatctccattcctttgatctctgcctatcccgtggctcatttttgcctgaggagctgaagccattcatagggtaacacgtcccaggcggctggtcagcctatataagggatggttttcttggtttagtgtctccgctctgggaagcttatgctctttcactctcaagatgcattaaagcttgtctgcagaaggatccgagtgtcctgcgtgtgatttcttgctggcgagaaatacagagcgcgcgggacaatctgccaaatgcttcttgacaaaatcagaaggcctattggttctctttttgaaatagctgaaatatgaaatgatgacataggacattataattaggttaaatgtttatattattaaaggcctgctattcatgtatatatttatatatctctcttagaaagctaacttgaggcataaaggttttaatgggcagaaggtgggtggtacacaatcagaggcaatgacttctggggatttattgctgagccccagagccctaacttcaaacaacagctgagggaagttaagcacttagagaagctcatttttttaaggtagagaaagaaccgctcacaactactcttggttactaggtttagagggtgactataaggagagtgtgctggctagtttttagctgtcaatttgccaaaacctttaaagccgcctataaagacagtctcaaaaagaaattatttagatcaagtcagcctctaggtatatccatgagggattgccttaattgttaattgatgtagacagacagcccagtccactgtgggcaccactattccctaggcaagggagtcctggctgatgtaagaggagagaaagctaagtgaaagccagaaaacaagaatctgagggtttattgtctctttgctcttgactgctgctattctgtgatacattaaattcctacctcaacttccacataatgtgagtcaaataaacccttacttcccaaagttgctttttcttggaggattttgtcacaggaacagaaatgaaactaggacagagagtttacatgacttttgaacactgtaatcttttccagcccctagagatagggaggaagcgtcaagagagtgccaagaaagtgggctgaaacaaattatgtagtggacttaatagaaaacctgccatgtgctgacatattcaccctcttttttaatttacgaaccagcacttccttgatgttccacacccatatcctcttggggatccccagtgggtccactgatctgcaccatttgtggattaatgttttcctctaccaccgaagccagggagaatatctccatcccatccattcaaagaggtttcccacagctattccaatgtgtctttaagtggtacccacccttctcagttctgaagcacaatgggcattgccttttacctagaaagagccccagaacaacagcctggaccattacaccagctctcagatgagtctttctgggtaccccatacacatagactccacgtttagaccccatgtttcatcccctctgagttttggattaaatgtggggagatcaactttttgtgggacaagagataatcacatgctaactctaaacttcagtctgtcagatataccagaaaaatatttgataggagaagaaaaagacagcagggactaaggtgctcatagaagcatgcaacaaaatggaaaagaaaaagactacagtatccagagtgctaaaacaattacaatattttactggagattttcaataataacaacatattacttaaggaatatttgtaagtaatttatagccatcctaatgagacccaggcccacttagggctttgctaatttacttatgtattggtcaccattaaattttttatcattagtagataataaccacatggcttgctgggatctcatgtgctactcctgaacatttgtgcattctgtaatgaccaactgaggattctcaggtcatccatcacttctctcaaacatctatcatttctttctgatgggaacatttgacttctctcttctagctactttgtgttacacaacacaatggttttaatttttatctctgttatatgtatttaaaaagatacatgaactcactccctctagccagctatcaatttatacccagaaccccgtctcccagtctccacttacctcccccagtctctgatagtcactgctctgttctctacttccccagttttttagaatccacacacaaatgaaatcagatggcatttgtcttcctgtctggattatttcatttaacattatgatctctagatcccatgttgctctcagtgtcaggaattcagacttttctatgatggagtaatatcatgttcctatcaaatttcatttacacagtcacccacatgtggaacctgcttgattccatgccttggctcttttgaatagaactccactatgcctgcaggaggtacagatatatctttaacatgctgattccatttcctttggtggcatatccagtagaattgataattctaattattgcaaatgcctcctctataagacaagggtctttaaggaaccagtaccaaccggatgtctgtttgtgtatatattatatccatgtgtgttctctgagcacataaaagattattctctagattgccttgcatagtaatggctgggtagtccatcgatggcctccattgctgaagaggcagggaactggtcactgttcagtccatgaagccttggcagtctcaggctgcttctgaagacctgagagctcattggagagcacctgggatagattggtggggatggccttctgtatttttatttcttttattggttgatgaataaaacactgtttggccaatagaggcaggactaggagacaaggaggattctgggaaagggtaggcagaacacctaggggtttattgcctgggtgattccacatctcaccaccctaaccatcaaaaccaaccatcactcctcaatattgttttccacagtggctaaactgatttacatttccaccaagagaagtccaggctcaagcaagtcccatggtttctgtaagtcttcagaggtagagtgtgctagaagcaccacagagtattcgggcgggtgggctcgagggcaggcaggctagggggcagcaagcaagcttggttttgaatattaacaccattaccaccggtcatgttttggaagagcattcattgaggtaatattcttattaggaaaataggatgggtggattgtggggaagcaggcatatgcaaggtgcagagtctggaacggagctatggtgaaaaaccccagtttcctctctcttctaatcggtggtttcatagtctttgtagcaagtgcaccacactaacgctgtcataactgaagccagtcacttgggaattatacttgaagtatagaatcgaagggtggggtggtgcattgatatgttgtttatgatctaataaagcaagctgaagatcagacagacactagctcttacctccacctcagaccaaaatgggtggtcctgtctccatgaatcctcagaatgaaattccaaacagcactgctctccaccaagcctcaaactgcaaacctccaagttcctgtgtcctcccgccttacatccctctctctgcctgccaaatcactcctgtctctacctccctagtgttaaaggtgtgtgataccaaggaccaagatcaccttcgtatgaactctgtttctcttttaggctatatcagtttcttgtaggtcagtgtggcctgaactaacagcaatccatctgcctctgtctcctgagtcctgggattaaagatgtgcaccaccaccaccacctggcctctatggctagctagtatggttgctgggattaaaggtgtttgtcaccactgcctggctctatggctgtgggtagctttacattttgatctccagtggctttaatagatcataaacaatgcatcaccacagctggggcaatttttcccaataggattctcactcgaggtcccctcttgcctttttaagtccatgacaagggttggtgctgagctcctgggggaccacaaacaatgcacatgttttcacgtttctgcatgttcagggctttctgaagaatccaggttaaagggtaagtgagggacaaacaagacttagaagtaagataataaatggacaagatttttctcctctgggggtatttgttcatattgcaaaagaatggaacagcacagcttttctctctcctgggaacaaggtctttttcttgtacttcagagtggagaaaagacagctgagattcctctcctagcaaagctctgagactccgaagtcaacaatgctgctgcacagatcccctctcctccttgcatgtgcctgtcatctgcacatccaattccacggacggagagatgggacacaatcgctctgcttctgacctagaaactctgcctcttatgtaaaaatgtaaataaattaaatgcaaactgctatctcttgggtctaatttctagcccatgaaagtctggattgcctttcagccatctcttgcttcatagaacctgggttattaccatctacagactcccttcaaatggacacacagggaaatgcagtgtgatggaggtttctaccttgataagatgaaattgaatgggaaagaggaattttctcatcttgaaaatgggagttaagatcttaagctgaatctcaattttgtttttggatcctatgggactgggtgaggacccaagttcaattcccgaaacccacataagaatgcggagcatggtggggcatttttgtaatctcagcactaaggaggtagatacagggagtcctctccccagcctaatcagccatgtacacagcagaacaatgagaaaccccagatcaaaccgaaggtgaatggccactgatggtcaccactcccatgcacacatgtacacgtgtgcaaatgcagatccatacacacaatggggggtcatctcgaaggccacacagttgttcttccactaaaacacagaactgtccaaaaacgctgtggccctcacagcagtttagatggaaagaaaacaaaacagaactgtttctctatcctcctgaaattcattccaccaaggtgccacagcaaaatgcctcctcagccctctgtgatcaagaccctcaagggtggacagctcatgtttccttagtgaatcaaggtcttcactgagtagccagtgggaagttggatgattctaagaggtctggatttctgtaatactaccaaaataccttagtcactgtcctattgccgtgaagagacaccatgaccacagaaactcttataatggaaaacattgacttggggtggattacagtttcagaggtttagtctattgctgtcatggcaggaagcatggtggcatgcaggcagacttggcactggagaagaatctgagagttctacatctttatctgcaagcaatcaaagcaactgtgtcccacactgggcataacttgagcacacaaggcctcaaagccctcctccatggtgacactcttcctactccaacaaggccacatctcctaatagtgccacgccctatgggcaagcatccacactcaggaatctatgggggccattcctacacacaccaccatggtacactccacccagattaccaccaatggggctgaatcttcacaaatgtgccacctgagaaaggacaccgggtagtaaaactcaagcaaccgtgactggcagaactctcttgattctgacaagttcaagctcccgtcagccctaaaacttctgactcccttcagaacagtggtcagaactgctagcctgcagccatcctgctactctgctgtggctcatctccagatcaagatcacagcctggcgcctgtggcagctcttcacagccatctctccctggcctcatttcttcctgcccaatctaattcactcaacatttcacaaaactaaaagtttagaaacctggtttctttcatcatctcagagaccatcttttttctgtgtttctggacctgttacccaaccattctgatctttgttcttccaaaatcttaagtagctggcttggattgccagcacactgctatttatggttccaaggttggcattcggtaaattgcaaaaaccctctggaagagttagtttacagcaagcagacaaattccaaccttgaagaggttaatcccttcataaaaccacaagaaaacacagtttcaagagatggaatctgactctagctagattgctttaccccaaaatttaactaatggtgtgagttgggttcttttttttttaatccttaataattaaatgtgtttgagtaagacaatgacaaaaccagcatcctgaaagtacatctgctccccagaagcttttttctttctgcatgatggcaaaaactaccagggagaaaactatttcatggggtgactgaccaggatgccagtagttgcttcttgttggtttttcattttctaaatagcaacaggaaagaccagtgccatggtttcctgaggcatcaatagggctgagttgtcagcagatataatgtgttaggaaaagcttaggaaaggcagggatggtcacttctgcccttgagtcgagtcatcacaaggaggatgggcagactatcactatctcatccactctgtcatctcctttccgtcagcctctgctggggctctggcctctggggacacaccgacctccactctgtagctcttgcatcagagctgcctgtgggccctgcccagcttacttggaagttgtatccaggagagataacatccaccctcattagtaggggagtggtctctgctctctaaggtacacctctccagtgcctgcaccctgctctacctttaaggaagacggggatgtggccacttcctctgcagccattaatcttagaactatgtgttatgtgtagggatggggcagcatttgtctgccagcttccatataagcccagagctcccttcccacccagtcaatactctggggccaagattttggagaattactctaccaggtgaaagtaacaaaggaggaacatttgaagcagaggaatctgtgccctggtggattgatctcagattacacgtcactgctacagatgtaagaaacacaagaactggcaggaagatgctgggggccatggaggtgaggacatcccttgcccaaaagcccctcaccccagggcaatgtctaattgttatttagggttaacaccaagattctgttccagagatttgttattgtggggggtcctgataccggttctgtatttaaacttgaggatgatgtgtgtatgctgtgtgcgtgtgagtgtacagatgcatgcgtgtagaggccagatcaggacctctgatgccttactctagggtttagtgccttgaaagagagctcatcaccgaggcaaaaatcactgtttggacaaatctgacagacttcaagttcactggatctacctgtctctgcactgtgttgctagggttacaggtacatatagctatgcctgacttttgttatacacgtgctggaattcgaacccacatcttcatgccttcagaacaagcatttcccagccttgaaccatctcttcactcttatacttagatttttttttttttgtttcaaaaactgctggactcctttgcaaccaagttctaaccagaggagagtgtataataaatagagcctcaattctacctccagggaggtcttgttccctttctctggaaaatagatactttcttttctagacagaacctcgctatgtagctctgactggaaccactatgtagaccagccaagcctggaacacacagaaatccacctgcctctgcctctcaagtgctgcctctcaaggccggaaggggagtttttgtttttttgttttttgttttttgttttttgttttaaggaaaacatgttgtcaagtccctggggaaacagagggacagaaaaatgatctagatgattcctgacttcctgtgtttagcccaccccacccccacctctctgctctttccacctctctttttatatttgctatttagagctcaatgaaataaaagtgtctcagaagatcttttttacaacctgggctttcttcttccaagggaccttctaatcccttctgcccctgaccctgacttactcacacattcagagatgcttagaaacctaactacagttaccacatcagtctcttgacaccaaattcttcattgtccagagccaaaatcagcagctactagaactggggagatgagactataatgcgtgtgaacccttaagcaacctcagcttgcccaagcacatcaaatgactggttgaaaatgcattgctccagagaggagggccagcctgagctcggcagcactaggcaaatccaagtctgagttgttatgtcccgtgaccaccatctaagagtgtgagctggtctcctccttgccacacctggggaccttcacattggcccgtgagcccttaaaagactatttgaagccacccattgttttttcagtgagcacaatttcaaacgccctgccctcaatttggtttaagattctgtgggggcaccagactctggtacacagaaggagaccacctcattgaacagatctcagggtttttctcactgtctaattccatcgcaagcagctatgagctgaggcaagggagccagaatctccccttcctggatgtgatcattaagcatcccatgagctggtctgctcctccttggagcaaggtcccgtgcctgggaagtactattcttacccatgtgacctggataatatttgacccaggtgggctgcctgcaaaccaggacagagttttcaaatggtgctattcattacttcacaaatcctccagtaggtctgctgtggctttatgagttcagtgaaattttgatagatattcacatatatattaaaaaatctgtgcagctctgacccacacttgaactaaggagaccaaaggcacagatgccctgagcaaacgcaggcagcggcttctgctggtagatgatgacataactcttggacactctccattctcagatgtgttctaagtttttcttctaatataatttgacattcgagaagtcatggtgagtggcttcatgatgccttctgcttctgtcaccacccaccaaaaaaaaaaaaaaaggtaaatgggggcttaaggggcacagattgctcagtaaagtgatggtcttgcaagtatgaagaagtatgagttcagtcctcagaactatattaaagtatacatataagcatatgaacacacacaggcaaacttcttatgctataaataaaagcgtgggaaccccactcaaataaagcagacttaagagttcttctgatgaatttttgtctcaataccctgaccatgtgacagatgccgagtggttgcctctgataccatgctctcaagcagccatgatgttagaaaagggaaagtggattaaaggaagaagcaacagaaagaaataaagggagaaaatgggaaaagcagcaaacagacacatgcttacactgagttgtcaagagttattggcttccgagactctctgactctgtgccctgggttttgaacacatgatttattgtaacttccaagaccttgtgatcactcactagttcttcatagacactctcctcggtcacttcctcacagcccatctcctttgctttgtgatatcctgcctactgtagaacctctctctacttgggtccctacaccacctgactgggacccaggtaggctacctgtatctccattccctccttaattctggtctctctcgaacccataacccagccacagctgcatgtctcagtgcctcttcccagcccacctcattcccttgggactcactggtcattcatggacagacatagggtaccccatgtctgcttcctccatggacccagaccctgagtcctacttaagggacctccagagtcagttcccttcctcactttccagtctgtcatctaccccacccactgtgctgacctacaaccatttggagtctaaacccagagttccaacaagaacatcaagtctgatgccagtccaagtttgaagctgaaacccagagtgagcccaaggctgagagccaggcatcgatctttcattccaaaacctgtcagattggagtaatcgcaaccaaagaaccaaatgcccattccacaaaggtaaagccagatatccacaccaagaaactccatgaatatcgtaactccaagactcgaggtctttccgggctaaaactcaggtctgacttcccagcactggaagaaatgtcgagtcaaacctcacattttacaagataaggacttgtatgtgaatcagagaactaaacaaggtctttttaaaaaatctctaggctaatgaggtttttagccaaacttcaaatccgcatcttactcttagcatgtgcgtatgcacacacacacacacacacacacacacacacacacacacacacttattttttaaattaaatttaaaaacaagagtcctccatcagttagactaggattgtaagaaaaagcaagaaccatagcttcccaatggactttgcccattgacctcaaactctgcgagctatggacatacctcattggaacctttatacaagttctggcaaattttgctagttttccactcgctgaatgtgccatccattgcacaacacaggtccaggaattagcccactgcttagagaagcaataccagtacggctggtgactctgccctgtgcttgccaccctgactggaaaatggctggttcttctgttagaatctgtgggttctgtggcttctctgtgccacataatagactcaaatccttctagttcacgcacaatcctttccctctacacacactctttcttccttccctttgcaatatcagcttaagagcaatccttattaacttgctgtaaaaggccaaaacaaaatcagttcctctctaactttttttaaagggaaatttattaatgccatgtactcttctcatgtaaatatcacatgcaaacattgctatcactgatgtcaaacctgaagttttgagttgttttcttcatggtaaacagggattcataagggtgaaattagacgtgtcatggtcttctcctgaatatgtaatctttaacaatggaagggagaagccaggcactatggcagctgtgtgggaggctgaggtggggaaaacactgaagcccccaagttcagagctaactctgtatctaaaaataataacagtaataaaaatgggggggttgaaggtacagcctgagaaaggtgaagacatttatgacagccatgtaaaaaacacctcagcttaagacaagaaaggaccttctaacaaagaaagtgcaacatcgttactccagtgaaaagcgaagttcttcctagtattcctaaccttagccagaattctaagaaaggatagcccagagcactccagattccccccactactccctctagaaggttggttaagaacaggggaatcattgctggggtttgaaatagattagaactaactgattaacacagagactaaaagtagacttgtcagcaaactattccaatcaggtgtagaagttactctgtagctcatggtgtctttggggaccttctatgaggtaaggctgttaaatttcacatcaaaattccattgtggcttttcaagagcatgagcaaagttgaaaactatttcctgcccacggcctttaactgaaaactaagcaaacaatccccttcctttaacagaaggcatatgagttactgttactttgctatgacaacaattcctggcagaaagaacttgaagaagaaaaaggttcatttgggctcacagttttaggggatttcgaccaccataacatggtgggatggcactgaggttaagatggcagctttagtcaacagagctccaggaagcagacagtagcagaaccagaagccaagctataatattcgaaggctcctacttagtggcctaatcccactagctcagccccaccccctaaagaacctaaaggctctaagatggcaccaagtgagaccagtttcaaaacacaggtctgtgggtgtcatcttagattcctacagaaggtatgagagccacgtgacctatgcctgacaaccagtgatgagtaataggtgagtgccactggcttttatcttcactacctctcttgatttttctcaataaaccatttctttctttctttctttctataaatatgttttactacaaaatctattatgttattgattttaaaaacacacaaattgtgtataattggttttttttcctccaacaccgttcacagtgttcaaggacacagatccattatgaatcattgtaacatcacataaagctcgatactgtacatggatttggagtaaatccacagaaaggaaacatttgcctggtctgaggaggcagggaatgctgtaggcaagaagaatggatgaatggggggttggaagagggagagtagaaaataggcacttaagatgatactacgagaacaacagcatgaagaaagaattgcagttggattagcgtcagagtgggaagcgattggtcctggtagttagttacaagaaagggagcctagtgcaggagttttggctaaagcctttgaacatttttcccacagggtaagaaattgctcacatcttcagtgatgcaacattgttaagtttcatttgtgaaacattattctagatacattctgttttgtgatttatgtttatataatgagacctagtgaaatatgaactccatcaaacttaaaattttaaaaacgactctcagaggaaatggtcaaactgtgtagaagtgtgcaagagtagaccacttgagcgttcccagtagcattaccaattagaaggagcagcgcatctggaggtgagctggaacagcacttcctaactgaacataatcaggaatctaaagtagctcctgagtggccagatgctaatccaatcaatcatggctttgtggggttctaaatggagcacagataacatttcctgaaatttaattacagggtctttttcttctgagagcaatttgcccccctcacaggcaccttccaggtttgctggcatgtaccctccctccctacccttgcatgtaatatgcatatataagaaattagaagctaagatctgcatgcaagagggaacatatggtgtttgtctttccaagcccgggtcaactcacttaatataatattttccagttccattcattttcctgaaattgcataatttcattcttgtggctgaatacaatacatacaatatatggaccatgttttcattagacattcatctactaatgggcatctaggctgattccaaatctattgtaaacagaggaacagtgactgtccatgggtgcctatctctgtatgaggacacagtcctttgggtagatgcccaggaaaggtacagttatgtcagagagtcatttctagatacgggctagataacatactaactcagatgtctcttgaccctaagtttctgtttctggaggtatgtgacacaaatctgtctgacactgcagagcctgtgatgcagaccaggacatcacaacagacagtaaatgaaacaatgtgtaacaaaagtcatgtacaataaaatgtaaaaagataattactttatgcaacaatctgttgttattacaggaccctggtgtgagttgtgggaaaatttaaaggaaagtctgaaccaaagttggaattcaaaagactgttaggtaaataatccttgggtaggtagagggcaaaatgaggcatagcatggggtccacagagacagcatcagattcttcatgtgtgtggctaatttgatgggcttgtgttttcttcaaacttgtggtattttccagctggcttaaagaaatagagaatttcagatcaaacatttggtgagtgtccaactttttaaaacaaggaagcaacagctgatctggattttgtaagcacaatgtcttaactgaacaccagcaaaggcagttcttacctactccatactgatagatctatggatgcagagtcaggtgaatacccacaaaacctcagaatcaatgggccactctttctcccccaggtagagtcccagacacaacttgagtaagagagcacctgccgagtagctgcaactgttgtacttgaggtcacaagtccatggacagaccacagagagcagggaccctgagggagaccctgagttagtatgttatctatctaggcaacaaaatggtttgagcaacaagggtcctagaacagatagtatttctgtgtctactgatgctgacttagtaatggcccagcatatgagcgctgagatgcaccataggtcctcattgtgcttcaagctcactttaagcatttgaaagccagaagagagtgtgcattgactactaacttattatcctaggagttgaagggaactacaatattgtgtgtgtgtgtgtgtgtgtgtgtgtgtgtgtgtgtgtgtgtgtagtgtagtgtagtgtattcacacctgtgtggatacatataagaggccagaagaagacatcagctgtcctgttctgccacttaggctaaagcaaggctgtcagcctacaagcccaaccaatactcctatcttaccccccagaacacgtaggttacaggcccacactcagccacacccagatttttaacctgggttctgaggatttgaactcagaacttcatgctttcacaccaagtgtatttacccactgagccatatccttagtccccatacgttttttaaaggagttttagcatagttgagataacaggagaaattttacttgttagaagtgacttttgcagtagagaaggtgagcatggcaaactctcagaaaggtctccaacttttctttttcatttttagaaccatgtcatttgaaaatgtcttcaattttccctgcttttaaattgaatttagcctgaaaataaatatgccatgccactcagtgcaaacacactgtaagaggccctaagaatgtgtaatcaattcttagatttctcatgagacctagtatttgccaaatcacaccattccttttgtagtctcttttggagttatattttgtttcattttgtttgagatgggatccatgtagctcaggctggcctcaaacttgctaagtagtgaggctggtcttgaaccacccccctccaatcctgttgcctacacctcctaagtgcttggattataggcaagtgacaccaggcctggcccaccactcttctcaaaaatgtttctgccattggatctgctagagagtatggcttcattattactcctctttcttcagccacaagttatgcaaatccaccttccgaggcagaattaccttaaggaacaacatggtgtgtccttcagtgccactctgaaactattgagaccatgcaactgagagcagtcagaatttcactcttgaacagctgtgaggaaacacaagctgtggcctcttgcaaaatctgcctgtgacttttctcgcttgactgtaatcccactttctctaaacacaacacaagctggcaagcatgagattgatcccaaattgttaccagcttttacttttaactggttggcattccattcactaacttatcactgaagctttgtctaaaggacttgtttcttggtgctggaaagatggcttagccattaggattagttactactctttcagaggccctaagttcagttctaagtgctcaagtctggaggttcacgatgcctgtaactccagctccagaagatacagcaccctcttctgggctcagagtccacctgcagtcatgcatacatacccatacatatacacacaattaaaactaaataaaatcttttttaaaagatttcttccttcaacacaggataggatgaggctggttgggagcagaaaagttggttaaaaggaagagtgctatttgtcaccagagtctccatcttcaagatgtgtcggtggcttcattcctccctatctgaactcaatgacaacttagcaaaaacaaaaagaaaaactctccatccttacaaagcccttgaacatgagaacttggtatgtgttctagtttgttttttagaattcagtaacatttgtttctagatgctctctctctctctctctctctctctctctctctctctgtgtgtgtgtgtgtgtgtgtgtgtgtgtgtgtgtgtgagagagagagagagagagagagagagagagagagagagagagagagagagagagatacactcatgtgtttgtgcctgtgtggaggtggctaagaggggcttgtacagactaagggtcaatgatgggcctcttccactgtcactcttggtataaacgtactacacgactgctccatagtatggttatggggaaggtttttaaaggctttttatcatagatatgagggtacagcctggagcatctggaagaatccagagcagagagagaaataagtagactggacatggccagcatattggacatggacaggctttctgtaagagacaggataacaacaggacatagagaatagagaaaatatagaaatatagtgaaacaaataggaacaaaacagagagagaaagagagagagagagagagagagagagaggaggaagaggaggaggagaaggagaaggagaaggaggaggaggaggaggaggaggagaaggagaaggagaaggagaaggagaaggagaaggagaaggagaaggagaaggagaaggagaaggagaaggagaaggaggggaggaggaaacatagcaagaacagcaggttacatggagaatgagtatcttggggagggaagccatgagctagagagagcttaggtaagggaggagatgagaagagctgggatgctagcatggactctgaatgtgatgctgatggagcctggagaccagcgtgagctttgatgctaacgggcaccacaagtagccacagttctcttctgtcagaggtaagaaaaatgactccgtatggtagaggagatgtgacttcacaaatccctgaggaacgctggcttcagtctaactgccagagatcctcctccagtccaggctgagctcgtttctagatctgcagactgccttttggagtttggggaattgcagtttcctttggagttgacactctccaccatatcctttgagacagggtctctcagataacctgacgcttgtggactggccatgatcctctatttcctccagcactggggctggagatgtgcaccactgtggcccactttttgtgggtgctggggtctaaacacaggtcctcatgcttaaacagcaggcactccccaatctgtagatgtttctttggggggtggttttcctaactgcctttcctcacgaaaccctttctccaatgctggacaaaagaaaccatgctggaaagtcctgcttatataactaatttcacttgacaactacaacacaggccaaacatttaatatttcacaacacaggctttttatggagttgctttatgtttcaacacaatacagcattcaaagaccatctgatgatccagccagccccttacatcccaagggtgcagttaaaattctagggggaagaaaaaaacctgctccacataacagcatcacgtcctgaccctcccttttattccttcccctccctcctgtgttctctggggtggccaagtcaataccctgggtaattcactttctggacactcccaggggctgggagaaaaaccctcctttgatctgagggtgagtgtattgactcctctcagtgccagcagggttgtgacaaatggtcattatctcagatgagataatgaatgagaaaatgctttgtgattgctttattattgttagtaatttatttgtcagtattgttattactgctaataaaaggatccccaagcttccggctctatagtcctcatgctgggctcagatttgaagaagatgcttccggatgagcacggaagggagtcttgtccatcactattccaggtcctggaatgagttgctagattaacaagtgcccaccacacctggttgattttgaaagcagcttctcaatgctggcctcgctcttcttcatcatggatactgtgttcatgtattcacacagtaaaaagttccatctgtcccctgctgaggttccagatgttcacacagtgaaaagttccccctacccctgctgaggttccagatgttcacacagtgaaaagttccccctacccctgctgaggttcccagcattccactatcaagactcatctctagatctagaacagcctaaggacttggccacccacccccaacctcctatccccccccctcctccagctttctccttggggccttttctccctaaagtttcccaaccacctcttcatgactcggaatcacacacacacacacacacacacacacacacacacacacacacacacacacacacacaccaaaaaaaaaggaagaagaaagaaaagatgatgattggagtgaaactctgagtgagcgaatggacctggcactgagagccgtggaaagttgcatctgcagccagaggtggttacctaactctacctgtaactccctgcagaaagctccacacagcgaccctggtcggttcagaggcatggaaggggaagcacttgagatgttttacttctgtgtgtttttcaataaataagcctgtgtaagtcccagtgggttggagtgccaactgctttctcaatcaaaaccttaaaaagtaataataataataataataataataataataataataatataaaagaataatttataatgatcaaagatagagtaaaatattattctggaggaaatacaatttgggagttagcagctggttttatgagggagataatactccccctcctttctccaggactataaatgcatttttattttatctttgcccagccctacagttgctacaaagactgagcaccaagaagattattctgtctcttccagggggtacttgacagtattgtgttacagacccaccttgtgctatttacaagcataacctgggaacgccctgacgatggctcccatctctttcttcccagacaaagggagactcagcccttctctgtctgggggcagtctgagttgggtcaatgttcgccattgtgtggcgaatgtgtcccaacaactattagcaaaaaggacagacagggcctggctcttacagttgtagggaaagacaagatttttttattttaatactttattattttatttgaattagaaacaagattgttttacatgtcaatcccagttcccactccctcccctccttccctcctactcccccccccaagtaataccctacctatcacatatcctttctgctccccaaggaagatgaggccttccatgggggggatcatcgaatctgtcaaattctttgggatagggcctaggcccatccctgtgtgtcttggctcagagagtatccctgtctgtggaataggctcccaaagtcaacacctatgctagggataagtactgaactattacaggaggtcctgtagatttccgaggtttcctcactgaaacccatgttcctggggtctggatcagtcccatgctggtttcccagctatcagtctggggaccaagagctccccattgttcgggtcagctgtttctgtgggtttcaccagcctggtctggacccctgtgcccatcacttgtccttctctgcaactggattgcagttcagttcagtgagtagttgtgagtgtctgcttctacttccaccagctgctggatgaaggctataggatggcatataagtcagtcatcaatctcattatcaggggagggcatttaaggtagcctctcctcagttgcttagattgttagctggtgtcatctttgtagatctccagacatttccctggtgcctgatttctctgtaaacctaaaatgtctccctctgttatggtatctcctttcttgttttcttctattcttccccagactcaactttctgctccctcatgtcctctgcacccctcctcttctccccttctcattctcctagctccctcccccctcctctgatgctcccaatttgcacaggtgatcttgaccctttccccttctccaggggaccatgtatgtctctcttagggtcctccttgtttcctagcttctcttagtgtggattgtaggctggtaatccttactctatgtctaaaatccacatatgagtgagtacataccatgtttgtcttttgtgattgggttacctcgctcagaatggtttcttctagttccatctattttcctgcaaatttcaagattccattggttttttttctgctaagtagtactccattgtatagatgtaccacattttctctatccattcttcagttgaggggcatctaggttgtttccaggttctggctattacaaataatgctatgatgaacatcattgaacagatgtccttgttgtatgaatgtgcttcttttgggtatatgcctaagagtggaattgctggatcttgtggtagattgatttccattttcctgagggtcaccatactgatttctgatttccaaggtggctgtacaagtttgcactcccaccagcagtggaggagtgttcccctttctccacatcctctccagcataaactatcattggtgtttttgattttagccataaaagactagatttttaaatctcatctagaatacagatctctttctcatctcattcattctaaagtctcatgctactctgaaatgtgttcaacagaaacaataagcttgatgtgtctgatctcattcgttctaaagtctcatgctactctgaaatgtgttcaacagaaacaataagcttgatgtgtagcattctctttgtgatatctttttacatttaaagtgcttctgcaagttaacaacccagagcaggaagaaggaagccacttacagaggtgcactgtgttcccaggcatctcctctgtcacaaagatacatatggggaggaagagatatgtatgcgtgtgtgtgtgtgtgtgtgtgtgtgtgtgtgtgtgtgtgcatgtgcatgtaagaagtaaacacccagtatctctcttgattacactccaccctatttttttagaaagggtctctcattgaattggccattctacgatgggccagactggctctcgaggaccagtgagatcctgagttctacccatctctgtccctcctgcactaaggttacagagctacacttgaccatatctagctttctggtgtgggtgctggagatccgaactcagatcctcatggtagcactacgcatgctttaaactgagccgtctccacagcccctcctaaggagattataatgttggggcatatttgttaatttctatctagaaatagctttctccgagtcctataataagcatgcagttatggaatttaaatgatctaccctttgagaagaacacaaggccagtgctctgagaccacaaaaaaaatgttcacatatgagacataactaagaaggagaaatagagagatgggaaagcaatcattatgctaaggtggatgcccaggcactcagagaatctaggcgtatgccatccatatgaccgacaagtaaaaggtgcctataaggtcaccttgaaaagacagttaattaccactccagaacatcaaaatgcatcacaaaaaagtctgaggtaggaatgatggttggaagtttctgagtgatgttttacacaccagacactgttttagttgctttgcttgtgttaatgtatttagtcacaatgtcagtcaaaactaagggagtccaacctttcattggtgcctaaagagtgggcgtcaggagggctcatcagaactaaagccaactgtaacacaccaagtgggtatcccgaggattggaggactgcttgatatgggaaacataccattcatgtacacatacatcacatacacttgcacacacacacacacacacacacacacacacacacacacacacacacacagtagcaagatatgaagacagaacagtttcctagaacaaggcacacatttcccatcctttacttgttgctagtcctcttacccacctgtgaacggattccggtcagtatttttcaagaaagtattttggtaacccggtaaactaaaaggaagttcctggggctttcagccttttttttcccacctgctaccacatgaaggtagctaaagagtgtgaaccaacttcctccaggctctgaacaatgggcatgtccccagcccatgtacccagcctctgagagcatccagtttctgtggaggggactttgtaagaacagtaacaacctctgaggaccttctgcttgatggaatggtgccaccaacatattttgagaccaatgcatcttagactggtcaaacacagggtcctgagggtcttgggtgaggactggtcatctagagactctgtggagttccttccatggagataagaactggatagccaggatagtcatatgaccaaaaactcaaacagaaagtgacaagaaagggaagacaacagatgcagagaaaacaaaaactgctgcagactcagagaacagagacacctgtgaacaggagatggaaagggcagaaacagaaaactttacccagagcaggtgtctgactcctgttgggatgggaggggccaaagacctgggagtccatccaccaggggtctctagagtggatatttcatgggaccctggtgttttcctctgcctggcctccctcctcttctccctcattggtccacctgggtatcctttcttgggctggctctgttggcttttctaacactcacaataatggaaaagtctttagaaacaagcagattcccgggatgcaagagtagccatcttaaggggccagccctttgctttcctgttctacctcagttcctttaaccactcatgtttggttccccagaactgctctagctcagattccaaagacccctcctcaaaagcattaagcagaatcccagaaggaacgtcgtcaaagcattctaggtattgacatctgaggcaaatcaatctggccttcaatgttagcttgtgctaccacttattagctttgtggcttgggtcaagtctttttctagcttgttgtccctcctaggtaactactccaccacattgtcctggaccagtcaaagtatgtaccagttatctcctggtaattgcttaaatgttgctctgagaagacccgagtttggaaaacagctcaatgatctctttatgatgctgtgaaatggaaaaaagtcgcactgcagagcgatttaggaagactgcgaccatgctgccctccacatggaaatgttctacacaaacccactacctctttgtccacctgcttgattacctcacacaattactgcaacaaattttaaagatttatcccaagaaaagatgattaaaatgtctcatcactaatttcatgttgacagcataaccattatgttcaatatgtcaacagttgggcatatacaattaaataaaatactgctttaaaatcaattgtatctgtttcttttttacttatcattagtgtggttacttcaaaggggcaaaattggggattagaggtgtaactcagtgatagagtctatacttatcatgcagtaagtcctgagttcaattctcaacaccgagagatcttttttattcttctcttatatatgacatcctgactgcagtttttccttccctcctctctccctagtccttcctctcccaccccaccccatccactgctcctccatcttccttcagaaaagcgcagatctctcagggttatcaaccaaacatggcatatcaagctaccctcccctcatattagggctggacaaggcaacccagcaggagggaaaggatcccaaaatcaggcaaaagaatcagggacagctacgctactgttaggggccccacaagaggatcaagctacacagccataacatatatgcagaggacctaggcaggctcccggatgtttggttcagtctctatgagcccctatgaaccctggttagtaggttctgtgggttttcttgtggtgtccttgacccccatggctcctgaaatccttcctccccctcttccacaagattccctgagctctgcctagtaacaccaagagattttaagacattaaagtgatttttaaaatgtataattgtttatgtggcttggtttatatttctgttgattgacagattcaaatgatcctgtgatgtgtctactatccctccaatcctactaccagcacccacattccctccccatgagaacacttccatctaagcctcaaggaaagaaatgaatgtatttatcagtgcattttaaagctcttttctgggtattaaaggttaacgggccatcaactaaggggtaaaatgaaatggatctgcatcacggctcaccacagatagcatctccttggggataaaaacgctgacctgagtgcattgggaaagctggaaatctgaaccaatactggaatgtgtccatgtcggccaggggagcggggtctgagatgccagaaaagatacggtaatctcagccacccactcgctttgtctctctctgtctctgtctatctctatctcagtgatttgctaattcttgagacactaatacaatatctcaggtcactagaagggggaggcccttctcacactccattggcactgttactgcaaaaaaaagtattctcatgccacataaacactcacccattgtcagcctctcctgtagaggacatcttaaccatgcctgctagtggctggctataggtatgcctgaccatgcttgctgccctgccagctggctaggtcgctctgtaagtaaggcctttccctaataaattcccttatatttttacctgagtccatattggtaattcccacatttctctccaatatctttcctccttgaaacagcttggttcccagataaaccctgacatagatgtcattcaataaagcacaaggcatcaattcaatccaaaacaataataaactcaactgatggctgtggtggcattcatataagtaggaagaataaatgtccaattaggaaatgctggccctggagttttgacattttcatgagatgcttagttttcaagaagaaataggaggaggaaagtgaggtggagaccaacacaaacagtaaagatttagaaaaactggctgaaaacccctgcatctaagcctgtgctgatgtttagacactcacagctcttctctgagagtgtggccttcggctgccattgaaacgcacattcacactgggacccaggatttctttttcaatgttctctttttaatggtttacagacagcaaattctcaaattttgtagtaattataaggatatagaaatgcattgcatatctgaaaaataggcattcttatttttcattctgattgattgattgctctttagtctagaagaacctgttggctcaacttgtacagacacctattaactctgtcacagaggtcaaagaaaaactagagttttgctaccaatccaaattgagtcttagtcaatgcatggggttttcccatctcttccaggtgtttctgcaccaggtcagacataaacactgacaccactccccagcagggcaccgcctttctggacggtcctgcagtttgtaaagaaaggaatgacaacatgaaaagtgtgagttgaataaatctaatcttaatgcattccataagatggctcatgtctgagcttcctcagctctcaccaaccaagtcctccacccacctcaccccacagtcaaatgactcctctttgatgatgagccaaggcaatgggaaaagctacggcttcaaacaatagcgtctgagatggaagcgaaacggcgaggtcctcactttccctcagcaaccacaacaattggacaaggttctggcctgagtgatgaatctgcaaccaaatggtacccagatggcaaccgcagctgctctttctaccagccgcacctcagctcatccatcttcaggacacacccatggctgaggaggagtgagaaattgagttgacagagccatcagagaatatcttttgccttctgcattcttttccttcgatcatgttccttgggcttcaggcttctcgttctcaccttcatgctgcctctgtgatgacacagaactgctgcctgtgaaccagggtgagtaatggtcccaggccccagtggaatacataatgcctaggatattgggttagggaggaggggcagagggaggtgaaaatgttgctcaaaatgcctgggtaggaaaaagatcttgtggagcctgcaagtacccagggagtatctgagcattcatacttatcctccatctaagtctgaggctctcgacagcacagcatttcagaattcattgttcaaatagatccgattcctatccagggggctgttaggccactgaccactttaaagctaatcagggaaagcggaagacgctggagacttgtaacaaatggcattaagcttctgtttcgtcttcatgacctaggatttataagaggatttcactagctttgcagcaatgtaaaatagacattagatgtcgatgaggaaaacaaaattactgccaaaggtgataagagtttggaaaaaggaaaagcaaggcacatgcagccactattcactgagcaagcccttcacagcactcagaagaaagacacagaagtgcagtgggttcctgctaagataaaaacactttctggaattcacatgattcctgaagaaggcacaaatgtgaccctttgtcacatagccttattgttctattcaaccatccagacagctgagtggatacccccactctgagctgtcagaagctgaaacaaaccattcacaaatttcaagggaactggagaaaactatagtgggggggaggagaataacaaatgcatctgttaatctacacagactacccaggtctaacagactttctgttaatccacacagactacccaggtctcacagactttctgttgatctacacagactacccaggtctaacaggctttctagccaaggcattattctttagcttggacccctagtgcgtaagtacagttacctcacccaccagctgctcaccaaagcatgcagctgtttgttacttaatataaaagagggaagactttgctttctgtgtgtgggcagcagtggccccgtggaagcagggagccctgttgcctgcaatgctgctatccctgcagtttacagaaatggactgccccaccactgtgtgggaagccaagttcatttgccttctctagctaatgcctttctaacaaactcagatgctagaaagcattttcaggtgtgaaggaaaatgtctttgtacactgtaaagtactcacactgtagattgctgtaactgtaaaacccctcctaagctagagcagagaagctcaccagaaagatgtgtaagagcaattttcatggattctagtaaacatcctgttcttttgcttttgtttccctcataaggtctcaagtatgttcacaggtagccatgtgtggaacaacagaggctgggagctggtacttgtgtccatgcaggattttagaaagacaggaagaaaattcaactgtattgaggaagatgacagggcactctggtgacctcagggtccagccctaagttgaaaaaaatatatagtaattttttaaagtcagagatcactggtgaatgtgaattgtatgtcatatgtgtttgtgtgcatgaacacttggtccccagatggtggtgctctcgggaagtttgtagaaccttcaggaggcagagccttgctggaggaagtaagtcactggggatgggccttgagacttgaaatgccgacaccacttcctgttctctctgcttcctggcagctgacacactgcgatcagacagcatcttgctcctaccatcatgtcttccccaccatgagggaatgatctcttaaaccgatggccagaatacccacccatctcaaatcacttcttgtcaggtctttggtcacagcaacaggtagaataactagcacagcccctagcagcattgcaagagtctgctgagggcatgatcaatagggcagggtgagcctcagctaacaagggtggagggaacagagtggattctgattggttggtaggaacagagtggattctgattggcctaattccctcaagcaggttagggccttttaaagaccactcaacctaggaccactcgtccacctaacctcgggttttcaggcaagtcacttgtccccaagctgctacttcctcaacaggaaaactggggaaatgacacctcccatgtcaactatgttgttagtgcaaagattaagtaccatggttatgggaggacactttgaaagtttcaaaaccccattaaaaaaagtaattaacttcattccaataaagagttgacattcatatatacaatagattaatggaaaaatctttagcactcctatgccaatcttgaatactgctaacctttctttgggggttaagaagtcgtcttaggaagcagaagagccttccagttacagaggtgttgtactggtttagactgcagttacaacttttacaggtacttatatgtgtgtgttcaaatatggatcagcagcagttaccacatcccattgtacatttagcttcccccgcccctgccccgttatataagagacagatgtatccattgaaaagctttgtaacttcaagaattctgagtaacactgaaagaacagagtaaagagacacaattctggggaatagccagatacacttggatacaattgactcaggatgccctgcactcaggacactttgtttctatctgcttttgtgttattgaatacaattgattaagggtgtccttcactcaagacactgttcccatctgctgtcctgttacaatatgatattgcctagaaaaccactgtaataaatacaaaaatcttgactgtcaacaatgtgactggaactcttttgaacctttgttcccaaacacagaatagtgatgaggaagatggtggctctaggacccagcgcgaacgtaaatgcaatagagcctaaatcggatgtctaaacatgaatggaggctcagaggattcttttctgctttgtttctcttaacatttactatgtggtttggtctctcccacttaaccctttcacaccctcttacatcattcataaacacaacagttacattttaatgaaagcacttaagagtgtctataatctgtgtataataaatctgccttttgtgaaatggatccatgagttttaagttagtatacttaatctgttagtatatgaatgccatattaaattaagaatgggttctgtagatccaatcaggcagaagaatgttctctattcctgcttatattgttaaacatcactccaatattttaaacaaatattaaagtattttggtaatggaagctatccaacagtccactgaaagaggactttttaaatatttattggagcactagaaagttattcaaatgatgaggcaaatgcatatagtgtttaggaaaaaatgctaaagtaccatgcaacataggatgctaggctaaaatgggtgatgataaaggatggatggacagacattcagaatgactgcgaaggtaaattcaaaatggggagcagactgtgtctcggtgctgatgcaaagctagcttggtcctgcccatgtttatgtgcttttgatgaacttacatagtagccatgaaattactacagcttaggatttttttctttttggaaggtcgtgccagcaaagtttcctctcctctctctctctctctctctctctctctctctctctctctctctctcttctctctctctctctctctctctctctctctctctctctctctctcacacacacacaaagctgtactgggaattggaattgagagaggggctctgagcatcacaaggaagattggactctgattttaaacaggaggcaaccactagattcacaatggagggagttcttaaaacccagtgaagaattgcttacataatcacaaagcagacttggtatttatagttgacattagcttccctcttcagtcatttcctcccagataattgagggctaagcaggaggaggatgggaaagtcatactgatggtctctagcactggggctacaggtgggggaatatagctgtgggtatagccaaatataaaatcatacgcatactttaaaaatatgaatttttttcagtttttgtaaattaatagtgaatcaactgtgtggctctcaagtgtaaacttagaagatgacaatgttgtaccacaatgtgtaaatattgggcatacctactaggagacaacagcccagctcaagcttgccttcctctagtgtagctttatttacatatgagtctctgtgtatacaccaagcctgttagcattctcatttctgctttaactacaaggagcaggaagttcctgctgtggtttggatgggatatatcctctaagggctcatgagtttgaacacttggtctccatctggggtactatcttagaaagcatagactaagtggaagaatgtaattcctggagattggtttcatggaataaaccactgtccacatctgttcctccctttcctgctttcttccttcatgaataggtaggtagatagatagatagatagatagatagatagatagatagatgataaagatggatggatggatggatggatggatggatggatggatggatggatagatgggcaaatggacagatgatagacatccttcctaatccatccaaattcgagcaggcttctaccatgcctttcttatcttgagggacaaaataaatcctccctgagttgtatagttgtatgtcatgtggttttgtttacaatggcaggaaactgggtggtatagacccatgcttcctcagggaacttcctacccattctgggttcacagtactgtagcaagtgaggtcaaccaatggttctgagagcagccatcccatcactcattcaatgaacagttttactgtttcatggggaaaccaccacaagaataactgagccatcaactttacagaagttgtagatgaaaatattcttaagacatgggagatatcatttattctcagactgttagtaaataggaaataggatgtgttcgtgggcataggagtcactctgtagacctgtcattaagcaaatgcaatgacctcagtgtggcgaaaaggagaggtggaaagtgccaagaaccaagacagccttgggtggctcacaggaagctgtgctcagctcctcggcacatatggaaatatgtgcatggtcacaaacaaagagtaattgcagggtagtttattaattgaaactaaatgtcctcttctttgtaacatggctgaatactgaaaacctcaacacatgacaaaaggacacgcacagtcagcagagaaacctcagctttgaacaccatgccaagaaggagaaagtttagcatgagtttgttctctggctccttatgccaaagaaaccacaaatgggactcccaaggatctgaataatggatcagctttcactcaagccctccttttccttccctctgtcattttcctctcgtctcttgtgtgcactgaaaatcggtgagcaactacacaggagactgaagcacccaaggtcatctttcacgtgaggtgagcagcacctgggggaaaatgagagtcacgcattccataccgacgaactaagaggtaaaaagaacaagacagaaatcaaatgagatctctaaccatgagccaccttcttccattgtcaagtaagcatggtcagcaatcagtaattgtgcatgcagatggcagtgtagagacatggtaggacagatttgctgtgtttataggttggggaggctaggatgtgcatgcacgtgttcaagtgtgtgtgtgtgtgtgtgtgagagagagagagagagagagagagagagagagagagacagagagacagagagagagacagagagagagagagagagtgggggccagaggctgatgttgaatgtcttcctctatctctttttacctcattttttgatatttttgagacaagagtctctgaacttggagctcaaggattcggtgaaactgactgcccaatgagcttcagaggtccacttgtctctgctcccttcctcccttcccactagccctaggattatagatgaaccactgtgcaaaattttacatgagtgttaggcatctaaactcaagtccttgtactttagcaaccgagccatcttcaagcccctgcttttctgacctttctgatcagatgatttttctgcacatatagtgtggttacacttgaggggctggctgatctattgaccaaatcctagtgaacaaatttaaatttactcccagatgttgccataagtgggtgttctagagattgttttgacctcctaggtctgattccaaagtattctttcatgacacaataactagggaaacgaaaacttcactatacctccttctttgaccatgaaataacagtcctgggctcaagcaaacaccatacatacaccagttcccaccatggaatccagagcatctgattgttctcttttcctggcagatgatgtgtgtaccttggtgtgagctcaggtcaatgaggtgctttgtagagatgatatttgcccatgaacagggtctaagtgcacaaggaaagactttacccttcagctttatagttggcaggtgcactaaggaggaagcccaggctgacatcatatactccatctaaaacatagaaaaaattaaaagggaataagaaaaccttcgggagtgagcacacctctctttttctcaggctgccgagaagacagcagacattcagactgagcatgctcaccaaaagcagcctccacaatctttcaaaacaagaagtatgtcctgctgggagaaaccagcaaggaaaaactcccttggtactccaaaaacatcattggtctaggcttcaagacacccaaagaggccattgaaggcacctacatagacaagaaacgtccttttctggtaacgtttccatccgaggtcagatcctatctgatgtcgtgaccaagatgaagatgcagaggaccactgccatctgccagggctatctccattacatccaaaagtaccgtcactttgagaattgccacaggaactagtctgtgcacctgtccccctgtttcagcgatgtacaaatcagcacattgtcaccaggggacagtgcagcaccctgagcaagaccatgtgctttgacgggctccaggtcaccaaggctactgacaccaagaagcagtttcagaagttctgagaggactctggccaactccccagaaccagaaaaaaagaaaagacaacatctctttttgcaagacaaggtcaaaggaggcaaagggaagtttctagaaatgaagcctagccaagaagttccatactcttgatgtctaaaacttttgagtggtagtgatggttgtttttcccaatcaagtatctgaaggatctagaaaattctttatagacaacatgcagagcaaatgaaggatgtggttttggtttctatagtctgtttgtcagtccaaagtccgttctgattttccgtctttataagcctaccttgtcactgggctcccagcctgagaccctttcaactacactaaacctgaaggtcctttttcatttttttatttgatcctctctttggattatttccaacccacccaaccgccaagattacaaagaaattaaacctttccagggtggattggggtctagcttggcagcttttaaaaactgcaaggcctagtgaggaggagtaagaaagggaagagggagccagggtaggaggcaaaacgagatgggacccacagcaaagtcagtgacccaagagagtctacagctgcagaccagtgcagacagctgagcacagctgggcccatattccccttgctgttcttcatcatgaaggcacatgggatagctgccatttttaataccgaaatgaacatgattgaaaagattacagtctccaggagcaaatggccctcctctctcgagttcttttgctatatgtgccatctacttgcagtttaaaacaattaacttttagacaaaagggaattaatctagtcagggatacatgaaacctagactcttataccttagaggctggaaagcaggtcaaagggcacaaaactgtccccatggaccctctttctagaaaagaggctggaaggtagtggttctcaacccttggggttattacaattcataaaagcagcaaaagtacagttatgaagtagtaacaaaataattttctggttgggggtctccacgacatgaggaactgtattaggaaggttaagaacttctgatctagggtgttgtgacttcaccagatgtcacagtggaagaaaggatctgtctcccatgatgctcctcagaagtgggaggggttgaggttcccttgtacagagataggagaaagggaagttgtgtggaggaacagcttgtgtaagttgaagagtctggatggtggactcagatgccctcaacggctgtcaccattctccaggttcaatgtccacctgacgtggaaatggtaccattagcacaacagggggttccctagctttccattgtgagccaacattcactgggatggactgtgattgtgttctctctctctctctctctctctctctctctctctctctctctctctctctccctctctctctctctcttcatctccctcctctctctttctctctctccttccctcccccaccccactgaatttgatagctggccactctttgagatgacacagatggccactccaggcggctcaataccactccaaacaatgtgacaagaaattgatcttccaagattaggactgagggcacgggtgtgggcagagcacccaccttctgtgaagaccatcactgggggcaaggggagataaaagagctaacacaggtgtccaagccgcccaccatgtttgctttggcaaccccagttttggtgatagcacaatgtcaagggactgtcatttatgtgggttgtcggtgtataactgtacagttacagctgggattgacccacgatattaaaaagatggaaatactaaaccacaaaagaaactatttgggtagagaaaggttgatggaagcaaagaaggaaaatacatcgtaggtggaacttcccctacttttcccagctacctggaaaagtgtgtgtggagtaggagcactgaaaaataaggactccccaccatgctcagcaataaaattcaaccaaaagaaggcagtctaattcattctttaggttttcaaatcaatgtgggaatattttgggcattttggtagctgcacctggctgggagctctctcggtgtggcagcatggtttgatcttcaggagtagcatagaagctcagtccccattagtgtgatggtttgctccctgactttaaagttgccattgtgggggggcggggactgcagagaacagcaaagtcaaagtcacaggttttgactgatggcatgcatggatgcatgggggcgtttctttcttgagcctcactgcactggattagctttaactgagccatgggctagccttgccacagaccaatcacatgaacccctcacctgcactgggctgacatcagggtaggtctgacatcagtgagaaaactgactgaaaatgaacagttttagaataatagatgcttctttgtttctggaatcctagaaggagctggtgtcagagatctgagaaggaaacaacttacaagaatggggatagcatggaaatcacccatccaatgcactcagtcaggagcagtatttggggcttggccctacacatttaaaaagataagagcagattgctagccttgagtttaaaccaaaccagtggactctttccagatacaactcccaaaatgttttggataaggacagttaaacccatcttgattctccatgtcaccctggccctgcgtctgttccatattgagttgtatgagaaattctaccttgtatgagtcaaggttctctggaggagcagaacccatgaaatgagtatgtattgaaagggaatttatcagactggcttacacagcaccatctgggtagttcaacactggctgccttcacactggataagctacttagcttagatggctcagaggtctttgggggaattcccaaagaaccacgggtcctaaatccacattggaaagctaaggaaggtgagttctagtgccagtgaaggatggtgttagtgatagcagcagcaacagaatagattcaatcacttgcaagaggtgaagcaagcaggcaaaaagcactgacctttccttcggtccccttgcattctcagactcacggaaagtgtacactccctagggaagggtgtttccccctcatctattataccctttgtatacccacccatggatatgtctcttagttgactacagattcagtcaagttgataaccaagattaactgtcacaaccaccagcctgacctggcaaacaccaataaccataatattgggtgggcctgtgaaccacctgaaaaataaaatctcatcacacagctctgctctgataaaagaaatgaaggcctggctattagcactttaatttcttatttagtcccttgtccattaagaacattctatcacagtttgttaataatagaaaagctctttgtaataaatcagcactgggacactgaatactttcttctgatcaatgcctagtgggaaactgacttctatgtattttaaaacagctctacctggatgcacttgttcttcatacagagaatatcatttgctgtacaccgtaaggttatgaaagagccagccttataacatttagagtgacatgtcattatttctagaatttagttccgttcttgacaagtagcacatgttcaaaataagtaagtgaagcttgtcctgctcttaacctaaccttaggcacttttattgcacatataacagcctaaatacacgagacattctaaatataactccgagtttcattaacaagtgaagtatcatgaaatatctcactcctttgcttgcactagagtgatgatggctcctaagtcagaactagggaggtgaggatatcttttcctgcagcttatggtccccacagtgcatcaggctgctgagactgcatccatccccatccatcattcatccattccataaaccactgaggtcctacctgctataacaccagtcataactcctgggagccttgttcctgtggagaagtacttgggctctgacaactttccattcttcttacaaactcatttgacttagaattttctgcctgcattcgacaatgctgggatttctagatttcaggtgctaggctgggtttgctccggtgggtgggctttatcaacttgttgtatctttgcacggtgttgtggtactatcattcatcctggctacttgcagattccttttggttttgttgttatttgtatctgtttgcagtactgggaatggggtccggggctccctgtatactggaaaagctccctttactattcacctagcaacaccccaaccttccaccacctgctgtgacatctctaatgagctgtaaatatatgtcagaagacacagaggttctgcctacttgtcaatgaccatcattgccccaagctggagaggatattggcggtcaggctggagagatgactcagtggttaagagtacttgctgcttgcaagcgcctgagttcagatcccagcaccaatgtcagaggactcaactctagttccatgggtctctacatcctcttctgatctctaccattagccacatgtgtggcatatacccacacacacatacacatgtacatataaataaaagtaaatcataaaatatgagggttggcaggacgtatatcaaagcctcgggccctgtgtttacgtaatttaacaagggacagtctcaatctttccaaattgttgttcaaatttccctccacatgaagtccatctgctcaaatctgcactggcttatagtcggccttacaccgcagccacccagtgccccaaaggaagtgcacacaacagtatcgagggcagagtaaatccgaaacagcccattgcccattaactggtttgtcaaacgacaacaaagcaggaagtaacaaggctgatcctagaactggtactttggcaggaacgctcaggtttctccacagtttgtaagtcgctccagctgcattttcacggttaatgaaatcgagagaggcaaactctagagacaaattaaagccctggacctgctcggagatgatgttgcagcaaaggggctctagctgtaggccagtctatggctacacacacagagctacacgccaggccctgtgtcgcagtttagtatctgtgtggtccacccagagggataaaggctggtgtgcatccaaacactgatcgggtctggtttgtgctgtgattcaccaagagaagacaagggcataatattttattctgagaaaactaatgaaaggatccgaaggccacggggagctgtactgtggtagcgtgagcagtaggtgaggagtgccatcttttggctatgggatgccctgacattctctaagtagaagagagctttgactttgtgtgctcaaagcaacttagcaaagcctctaaagttctttcctgggtacctttttgtggcctcatgcttgtaatgagacttctcaggcttccccacatcctgatccattagtcatagcccaaatggttggtgttagctaccactgctctctatagctcccagggggtccagaggagtgggagcagctaggaaatactctgagcacgagtgcattaacacagaagaaacaaacagagagtctgattgacctagcatggtcctttgagtccaatagccctcaacttaccccaagctatgtcatcttgaagagatatagtacctggttggataagcatggaattttccagagaaataaattaaacatgcatgaagcacaaacagcatgcaggtattgatgatatgagttccatagactccccaccttgagaaaaatctaaatatagctgtgctggtgcccattaactgtagtaactgagagatggaccagcagttaagtgcacttgccgtgcttgccaagggcccaagtttgtttcccagtgcccgtaacagacagatcataacagcctccagctccaccccagtggatctgacaccctcttctggcttgtgtgggtgccaacacacatgcggggcacacatgcatgaacacacacacagagacacatacatacacagacacacaaacacatacacaggcagagacacacacacacacacacacatacacacacacacacacacacacacacacacacatatatatatataaaataagcacatttgagaaaggacaggtgacttgggcagaaaagagcttctccagtgacatcctctaaggtcagccctcctcccgagggtgctgagagacacctgtgagccatgtgttctgcaccggagccagccttgtcacctccttctttcatgatttttgcacacacaactccagtccaggaggaagcaggtaagggcacagctgccttaccccagattcacagtgtttctgcaatactctttctaatagagccagtggtggggaggtcttgatctaaatgataaattttatttcctaactgtcccccaaatgatactagacctacctgcccctgcactcacacctaggtccccacaatagcccctctgagatggtaaaaccctggcttcacatcagaaccaggtcaacaagcagcagagatgacttctgtgcctggaaattcatttgtctattccacaaatgcaccgagttcctattaaagctgctatgagccttccatctcaaagaatcgtcccagttaatcatccaaacaaccagatgcaataggtgtctttggtgtctctactggatggataacgtagccgaagcttagggaggagaaatacattctaaaataaggagcctggaatttgtttgtttgcttggggtgtgttttgtttttactgtgccaccataatgaaagggtcaggtagacatgtgaattcagagaaatgaaaagtacacaagttaaacagctgagaaggaccagataggtaagaaaagatgaaatagcaaagtcacaacaaacagggttaaaatgggtgaaaggcgactcaacccagttagctgaaaacaattttgttactattcccatttctgtaatttttttcagagaaataaaaggaagaatagaagatcaaaagagagcaattgagccacaaccacaggctaaggaaccaaagctggtgaaatttggggaggagcgggggtgacttgggactctgttagcaccaaaacataatgaactcattgttaacttttattcgattttgtttattcagtaaatggattttgtttcaaatgaaaatatgcactgtagaaataaaatctgaaggagaacaccactaacaatctctaaaggacaaacttcactagggagtgattacagacaatggaccccaaatgttccaggttaaaatcatacatagtacaggccatgggtcccatgggaggcactctgctcttccagaagactagggcaaatctccaactttatagccaggagaaaaggaacagttttagagtaagtcactgcaggaaaaattatcaggaagaaagaaatgggtttaagaagtaaattgtagaatcatgaattatttgattctttggaaataggagtggcattaaaaagtaactccaagctggcatgtcaaaagcaggagaaaaggtggcagaggggaaaggtgtgtttcttctaaacttaaaggagagtcctgtcattgtcagtaccaggagattaatacagctgccaggggaatccatcacagagagctggcatactgacacatcctaactcgtttgagtttgcgtgcgtgcgtgcgtgcgtgcgtgcgtgcgtgtgtgtgtgtgtgtgtgtgtgtgtgtgtgtgtgtgtgtgtgtgtgcgatcttactcttttccatatacaccacactcaatttctactctgaacagtacctctcatcagtacagggcatttgactcactgttactaatgaaggccagcagctgtgttgtatgtccttttcagatgtcaaatctatcagaatccatactgcatttagctgtcatatctccttagacacctcctgatggaggcaatctctcctgttttcctagtgttttgataactgtgacaattcagaggagacaggccaagtatttcataatccatccttcaattaggagctgcctgatggttttctcacaatgtgactggaattataggtttaaagaaagaaaaccacagggtaaagtgtcattttcatcccactacaccaaaggcagctactgccattgtgacctgtcttgccattgatccacaggctgaggcggtgtttgtcagtttctttcactgcagtgttttctgtcgtcatcaccaccaccccccatttccatgctgtacgctttggaaggaagccatgacaggagcccaggctttggggataaagagcatgcatgtgctccctttttgaaaaacaccgcagccatgtaaactattttaaattattctgcaaaggagattatcactcctctcctattcatgtgtgcatttatactctgacttgaaacagtgtggagttgtggttatttatcttataccttgtgctataatttactcacacacacacacacacatacacacacacacacacacacacacacacacacacacacacacacacacacacacggcaaaattattctacctttggccatgtatccatttgacatagcagggctatatttttgctgttggatggatggatggatggatggatggatggatggatggatggatggatggattggctagttgtttggtttgttggttggttggttagttggttagacagttgattaggtggttgattaaatggttggagagttagttaggtggttagttagatggttggttggatggttagctaattagttgattggttatgtggttggttttgttaaacttttaatacttccttactttctaacaccacaaagtaatcctggttcatcttatttctactgctgctgggtcgtgtgtcttccccaaagcacattagaatgtatgtaatctccatggccagtgttgaagaagtgggatcttccagaggagactgagtctctaatggtcgaaggtcattattatgggagtaagctcattcctgcaaaagcaggtcatttatgaagggaagctttgaggatctctgattcaccttcctgtcctcttttctctgcccctctaaaattctggggctaccttcatatacttttagcctatgcccttgtttaaatataaaatgtctcctgtaggcacatgtgtttaaagccttgattcccagctggtggagctgttccagaaggttctagaacctttaggaaatggagcctggtagcaggagttaagtgactagggtgggccttggagtttgatagcttagcctcatgtcccatcttctctctctatccaattgcataacaaatatggccagttcacctgatgctctgatgccatgctttccctgccaggaaaaactgtatcccttaagctctaagcaaacaaaaacactccaaactcccttaagttgctcttgctgggtatttggttacagcaacaagaaaagtagccaatacaggctggaaggcctataggcatgaacacttcatgagttgcttggtaaactttgccgagagaagccatgagtctgagatttctatcatcaccaggatatctgtctggactctctttctttctggtccttgtgatctccattgaaagaattcagatgagacacagacaccatagtgtaggacacagtaaagtttattaaagacagcacactctcaagaggtaagaatgaacaataatagccaaaggagccattttatcagtctttcaaaatcctttgaacaagtagcttttcatgagggtctttgtcctatcggtgtgactggcaggcctgtttgatggtcgcatccaggagagacaatggcgggtgtttgttctttatcagaaaaccccctactctagagtcaccttagaatgcatgggactcctagagccaagtttcaataattacccattgatagtcttttgggaagttcaggttatctccacctaggccagagatatgactcaagtacccttccctgactaataaagtcttactgctctaatcttgaagtttacaggctgctgactacaagggagggttctaacgcccagtgcccgccaagtctgctgaagcctaagtagttacctaacactggaccttgggagctgcccctccccctcccccaagcacatgcagggggcagcacatgggaaaggacggttgttgcagagcagtgcttctcaaccttcctaactctacaacccttccatacagttcttcatgctacggtgatccccaggcataaaatcatttctttgctactttataactgcagctttgctgctgctgtgaattgtaatgtatctgatatgcaggatacctgatatgtgagctccccccaaaagaagttgtgacccacaggttgagagccactgttctggaggcttataatataatgttacagttttgtactctcttgggacccttacccctttcctctccagggatttctcctttttgaaatagaaatctcgccctagtcccaccccacgactgtgttgttaaagcatgtaacaggcttacagctggaaggggctgtctctcacggtgacccctgccttgactagcatccatagccaatttagaggcccccgaggcagaggcatgcctgacatatgcgtggaacaaaaatgagaccagtgaacccaggtttcctgagagcagaggaaaataagacataaatacaatggtcccatgtagtacccccaggggtgagaaggaggcacagtcacacagagcaccaaggccaattcgagggatttggctttaattcaaagaactatggcgggataccttatcagctatggaaacgtccattcaaaatgatgcatctacctgttttattttgaactccctttaggaatcatggaaaataccatttgactctacacaaaagaacactccaaagtagagactctacgtcactaacatagcaatgatagaatgtcacacgtgctatgcacatcttggctttggggtatttctatgagagcctaaggcaggctggggaggcccccatgaggattcctccgtactgtcttcaaagatctaagacaaagcagacatccaacaccttcccccaggtcctactggtgagctcaggattggagattccattgtcaaccttatcgctagtgtttggtataactgagggaagacagagggaagacagtagatgagggagaaagtcttcccaggggagctgggtaattcctcccatgagatggtgcctgtgctggaggctcagatttcttatgaccctctcaggttttccttcctttattctctcattcagaaggccctacacattgtgtctgaggtacttacagcatcacttaatcaacaacctattagagttgagaagagtttagagtctaccactcatcacaaagcctcctggaagtcttgagaccagaattttctctctcctcttcagtggctttctgtctcttaggaggttcctgtgggaagtactggactgatgacggaagaggactcagactcattcccaccacttaggagctctgtgaccttggttggctgactcaccctctcagccgcacaccccttaaccatacaactagaataaaggtgggaaacatctaacttatagggtaacttactttcaaatgaactaaaaaacaagcaaagtgtctagaacattgcatgacaaaggctttgatttttggacagccccttcctgtgtataagacctttgggcataaagactatctatatctagctcaattctgcagctcctttgagatctatggaagacctgtattagtgaggttcaatggcttttagttggattggaaaatatatgaatattacagtatcagttctcacgagtttaaggaagaacacacacaccctatacccgttcacattatctttcagcaaacatggtgtaccttcaggcatatgttattcacttaggatgaagtgtcccaatgctcactaataaacatagactcggtgaatgctgctgactgactgaaagctcagatgccaggagagatggagaactattaggttcaatagtttccaactgtgatttctgaagtcactgccttactccacacaggggacctctagggagagccaaacattcaatttgcactttgtttttaaagacatacagatttcaccagagttcatatcgggctgttgccttttttcccaactcttccattaaagggaaatcgattatgcttattggaagtcagagtggaaatgaggtgtgggctgctgctgagagaggcctcgttacacctggattcctctctccccaggggaactttccaaagccaggctgagtggcatgaaagacacaggaaaacaaagactgcatagctacccgcaaccaggctcttggagtggaggcgcactgcacattatacttcctcctggagctactggtcctacatcatgcaaagtctcttgaaagttgacttcacactacaacaaatgaggcttcagaaaagggactgagagacagcaatagaaatgtcctgctgggtcacatgaaagcaatgtggtcctggtggcagtaccccagctaggctcagcttacaaagactagatgccacgtgccaaagtacacccacttccgatggtctgtccaggatcacatgctgccaggtgcacttggggctgcaaatgaacttccgaatgaccacgcttcttgggaaaattcttaggaagtgctaatgtgtctcttcgtggccaatccaaggagacagaggtcacaccagggaagggatgtgtacatatgccatccaaaaatctcttcctttcagttggctttgcagctatgagcagaacagagttgacaagaaaaacctgagcctagtcccttcctagttggccttgctggctgctacaatgtggttttgaagccccccccccatcctgaaggcatggcctctagtccgtgaaactgttggggagagatggagacttcagaagatggtgcatggggatcaaagctaggtcagtgagggtgtgccctcaagcatatacacaattaaaaataaaaacaagtatcttcttttaatgggcccagacagaaatgagggtaggtgtctatgtttgggtgggagtgtattttcagaccagaagatcatgtttttgccacttcagtttctgaacatcctgaagtcattcccccaaagccaatcaagtcagatctgtagaggtgggctcagacatcagcattttcttatattctccaggttatcccaggatacagccaagctggagaagcaatggcgcatgccatcagcatctaaaggagaggcagaggtgatagagaaaacccaagctctgccctggcctccctagtgccagctccacagcctctggaagccaaatctacagcaccacttatccaagctccaacacacgtgttggcatgtgtcctgcttgtttctaatgctgcccagagggcaaaacgttcctgcaagccatttcttaagtgagtcagttgagtgcgcatagttgaaaagtcgcaaacacatcaactgaggcaatcttgcttaaaagacaaagagacataatgagaatagacgcgaattagtatctgctcaatttccaaggacaaagagcaacctccacacagccgtcagtgagcactgaggatgccaaaggcttggcatcggttgggttcaattgtttctaaggagaacaggaaatatttatttaggattagaggcagctgcttcaattggacagctggggatgctgaagatataattaagaaaattgtttgagggaggtctggaaagagaccaggaggcaggggagactaggtagacattgtttgcacagggttcttttgtgggggcagctgagtgttactcggagcttagaggagaagataaatatgccatctaattagcagctgacttggggttgcaagatcaaatacggggagaatgctattagagctgctgctgcgggtcttccaaattgttttgttgagtgactgcatcataatgagtacctgctagaaacaaaggaacacccgtgcctctgcctcctctcaaggctctcctctgcgccccccttctagaagggaatgtccccttctaagtcagcggcaattaggaagagagtggttgttcaagttttaccatcatcatcaaaactgtgccagaattaccagagataaaaggatggagctgtggggaaaaatgagcaaagttatggttctttctgttttctaaccatgtaaaaaattggaattgttctaagcaaaataagaaaggaatcctttgtccttccacctgctctaatttatattgaccttggatacgtatttcatgccatgctggaccacaccagggttttatctgtctcctgaattaaattaaaagtagttaaatagaaaggaatttattttattcattttctctctggtgtgtctgtgagtgtgtgtgtgtgtgtgtgtgagagagagagagagagagagagacagacagacagacagacagacagacagacagacagacagagggaggtgtttcctgcatgtgtatatgcctgtctagatgcatatgtatgcaagagcatgtgggtgtcacccttgatagctctccacattctaaactgaggtacagtctctcattaaaccttgaactcactatttcagctagtccaggtagccagcttgttcatggatcacctgtctctgctacccacattctgagccaacacaccaacatgacacttaaaaaaaaaaaaagaagaaggatttatcttttaattaaattatactgctaccttataaaagtgtggggttcaacatttttttttctgaaaatcagagcattagataatttcaaatacagttacttgtgttagtattcaagcatctgtacaggcatgcccttggagtcctgacaggattcgtcctcagctgctgccactaagagcaccacctgtgcctattcacaatgttcccttttaaaagggtctgccctcctcccatctttctctctttctctccctctctctgtatgtttctctttctctttctctgcttctcctctctccagctgctcctgtccctgaaggctgtctcccccactcacctttcccctttttacaatccttttcccctaataaaaaaaaaaaccctccacttgaactctgtcacatggcatctttctcttgtggtccactttttaaaaattacaataacttggccaatagataatgtgcctaactaaaacatctgcagaactgagagagcacaacccaccaggcttccccctcttgatgggttttgagttaggttcttactgtgtagctctggctggcctctaactcacagccttcctaccccagtcttcctagtgctgggattctggccatacataccccacagggagttttataccgtactgaggtccaaactctggccctcatgttttctgcaagtgttttgcctactgagctatccctccagcccttccctcagccattttttatgatactatgtttacaggagatgaacaggagtgtgagtttgagttatggtggctccaattctctccaaaaagaagatttgtgtctgacgacagtttccttttctactatttcaagatacaagcgttaaagcagcagttagatagacagacccacctgaaaaatcctagctctaaggcatgggtggcctttaaaaaaaagagagagagagagaaggccaggcattggtggtgtatgactttaatcccagcactcgggaggcagaggcaggcggatctttgtgagtttgaggccagcctggtctccagagcgagtgccgggataggctccaaagctacacagagaaaccgtgtctcaaaaaaaccagagagagagagagagagagagagagagagagagagagagagagagagacctatcagaacaatagcctagtggagtcgagtggtttgtatagcgatgcttgcaggttagggctagccaggcctgccaatggacctcatatctatggccttcagtctcttctctgtgtccgttgaccaggctacagaatgacatgacagccattctgaaaatctgttcctaaagcagtctttcattaataaacactcacttgtgtattaaataatattaaaagtaattctggctgggtgttggtggcacactcctaccagcacttggaggcaaaggcagaggcaggtaaatctctgtgagttcgagaccagcctggtctacaagagctagttccaggacagcctccaaagccacagagaaaccatgtctggggggagcggggaagaaaagtaattctgttgcaattaaaaggcaatgaccagtgccaccctcccctgttcatccttgtgtctttgctaataattatcatgaaggtgaattatcacagggatgagagacactcctgtccccatcacagacatccagccacagggagattatctgaattcaaagatcactaagatgaaataaaatctgtgtcacatccctcgggtgtcacagtcacactcagatgttcaagagtcgtggcaaacatgggctgccatataggacagcacgggtagaggatatccctaccagtgcctgaagctgccatcagagaaacaaagaaaggaccacaacctcctaatgagtaagcatgatgctcccacctgccctgccacagatctcttaatgggacttattcaagttttcaaatgctggtttactcaaatcagaaaacaccaataaacttaaattttagtctcatggtatatcctacttaatgaaaatccataagccattaccaaaagatgaaaagttgactagcattgggagctggggtgacagctcgtgagttaagagcactggctgctcttccagatgacctgattctcagcatccacatggcagttcccaaccatctggaactccagttccaggggatctagcgcccccttctgacctctgtgggctccaggctcacacttagtacacacacatacatgtagggaacacactaacaatgccccgactttcctccatacctatttctttccagatccttgacttctggttttattatgtgagccatttggttttagcagagccatctgtgtgaccattgggttgacattatctcttggagcctggtggggtcattagtggtacacaaccgaaggaaatgactgccctcttcctgaatctctctctgggaaacagttcagcagtaaggtgtagggcccccaagagtccctcctccatccttgtctggctgttgccaatatatttaactttctcccatgagccaggtttgaagtgtagctggatgctttatactttactgcccttaatcctctcaacaactctgtctacattttataggttagggaaccggctacaggggataaagtttcctgcccgttatagggttggccaattaccctgatgtgcaaaggactgaggaacttctccagggtgcatggatttcagtgctgtgaatgggaacaagctgggtgaactacaataatagtcacagcatagcggggagcgtgtcacaaaacaatctcagaagcaagagccaactgaagtcactcttgccccaaagttcaagagtggatatacttcagaaagaaaaaaaattcacatgtggttatgtaataaaaattccctccccctgtatatctctcatcgtgaccttacttctctcctctgtttctagttatcactggatcgcaaatccaacttgaagatttagagtctgtgtgatccgattttctgtttttgttcattcccagctttcttcatacataaattaggctttgtgctgacattcctgtgattagagaaatctcatgagcttcgggagtttgtttactggcttggcaaggttttatttactggtttggcaccccctctgctgcaatccaactctcctgactcattccctcacgtgattcggcatgtttcctttcaaagactcaggtgagtgcatttccctgatcaccgcgcagtgttctttgcccactctgtgtacaggatcgagagagattgcaatgctacccactatgtaaacaccatcaacatcacctgaaacctggaagaaagagcaaatttgtgagcttcaactcagccagagattccaaatggcagagtgaggaccagcaacctaggttttcacagcccctgcagacaacttgcaagtacattaagttagagaagccctgggctgtactagacccgttgttcctagacatctctaaacattcaagtctcctgggaaggggctggagtgaagttcaatggttatagcatgcggtatgtatttaaaagtttctgtgcactccaccaccaaacaaataaatagcatagcacagtatgagaacttgtggtgctcatcattgaaaaagaaacctttccaaagtcaaatgaacagcccacattaagaatcaatgcagtgaagacaataaaagcactttctggaatttttaatggtttttccagatggggtttctctgtgtagctctatctgtcctggaactctctctgtagatcaggctgccctcaaattcacagagatctgccggcctctgccttccagagtgctggggtgaaaggcctgctctaccaccacctggctactttctggaaattttacatcaattccttgcctatggaaaacaatgcaaaagacacatagagatttctgacaagttttctaaatatgcatattttgggacaatatgaaacaaagaaacagaacaaaggataatttttttttgaaaatttaagtaaatcaaaatctgagccaggaaagatgggtcatggttaaggacatgcattgctctttcaaaggatccaaattcaaatccaagcacccacaccaagtggctcacaccctcctgtaactctagctccagggttttggctatcctcttttggcctccaagggaacatgcacacaggtaacatatgctcacatagacaaatgcatatagataaatcctttttaagaaattaaatctttttgggtatacaaaccacacttaagggcaggccctatgcccaacagtaaatggccactacaaaacaaactcattggcaattttggagggtttttgtctcataatgctttgtctgagcacttttttttttaaccttacagatattttccttatatactatggtttttgatttaagtgtttttatgggattagtgctctctctctctctctctctctctctctctctctgtgtgtgtgtgtgtgtgtgtgtgtgtgtgtgtgtgtgtacatgcactagatgcatgcctgtaaatgtttctcatgctttttcttcggctcttcttttctgtttgttttgtcctattctgttttgtttgattgtttgtttttagttgcctatttattttctaatgagaggaagagagggtgttgatttgggtaggtgggaaggtgggcaatctgggatgagttgtgggaggggaaactgtgaccaaaatatattatatgaaaatagtctgattccaataaaaattaaaattatataaatgtaaattatataaaaattaagccttaaagcattaaaattcattccccaactagtaaataccacccaaatgaaaatttgcactcacagccactttcatcatattccacaaataactgaagcaacgtcatcagaggcaagatgatgctctcttcctaaggtcacggtagatgacaaggataagttggcaatcaaaggaatgactttttgatgtctgttctccattattctaattgtggaatgtgataattgcccatttgctattagcatttctacaattctgtgatttgtggccaaatgtcgaagtttccttgatggtgtggtgatctgaagcaaggccaaatgaccagagatgaagcggaaatgttgaaatagggcattttacagtactcagcacatctctccttggcagtcgtgagggatggtgtaacaacgatatgacagcccaaggctatgacttgaagcccaaccattttgacaaaatttgactgaattaataactggccaatttattcagcccatcaatttgcttgaagttgagtctgatggaaataaatttaataacatctatcctgccagctgactaattttctgttgtttatgtgtttgtttgttttagctggaaggacaatgtgcttcttatcatagcttgaaagatgatacaaagggtcaccaaagttaaattctctccctcaggaggcatgaacagctccttgtggatggccacaagcacccagcaagagtcctgggattcattacctctttaaagacaatgggaccatcaagctgttttagctaccaaccttcctaatcttaaaagggaacattatttttacatttttattattattagtgtgtgtgtgtgtgtgtgtgtgtgtgtgtgtgcgcgcacgcgcgcacgtgcgtgcgtgcatatacatgctgatgcacagcatagcacagcacaccacacatgttggcagacagaagacaacttatgggaatcagttctctccctccaccacacatgccccaaagatcaaattcaggtcatcaagtctgatgagaagtaccttgacccactgagtcatctcatcaaccctaaagagaaagttcttgattgtaaacatggggcagaaaacaaaatgtgttgggcaaactatgttaatcaaatttgagtgaaattttcaatgtgaaaaacatagctgagatacctaccttatggggtagaaaggcttaattaagctcatggcttcagaagttccagtccacgagccatttatcctgttgtttctgatttgagcctagtacatcatattgaagaccaatggtagccaaaccaatcatggcagctaaaaagcaaaagagaaagataggaaaggacccaaccccaatggcctagtcctcccactagactctgcttcaagatttcctctgcccccaagagcacctcaggctaggagcataggctttagcacttgagtcttcaggaaacattccaggctcaaactacagcaccagccatgacaacaggcgtaatctggatatctacgaccacacaaaggggattaaaagccacaaagaatgagtatacagagtatacacttactacagatagaatagcacactatctggatttaatgaccacatatgccagagtagctaggagagtttcacatcttgcaacttcacatttcacaaccagaaggaagatttacaagtttgccttcatgaggctctgaatctaggattcctttgtttcatcttggctacaatggctataatatcttagagcagaatggtagttagtcttttcagcttggtgggatttagaattactatggaaacagatgcctggattccctggctatgtctgtgacagtgtcaacagaaagatttagctgaagatagaaaaccaatcctgaaacgtaggtggcatcactccctggactggggacttcgtatgaacagcttccttttgcccctgtcccatgtattcccagccatgatggactgtatccccaaaactgtaagccaaaataaaccttctctccttaattgcttcttgcccaatatttaatcacagtaatgataaaagtaactaatacaagcagtatgtgcctacctctatgaagactacccatcttcttgcccagtgtttcccaaagaataggatttataggggcagataagaaaatgttaaggcaaaagcattttatattatgaactccagataagccctaagaaggacagagctccagggcagcttcttatcctaccttcaatccatttgtacatcacactgagtctcacatgcgccttgaagtgttcaaccactcacaaatctgagcactgaaggcccggcccctcggctgaatacagaccagctgcccagcccaacaaggtggcaagcacagagctgtgggagtctgcaatgagcagtaaatgtctagagtcgggggtctgcaaagtcttgtccgtttgactccatggagaatgtagtgcagatacagagccaggcagaacagaggtctctaaacaatggggcccacttgctagagtgaaggatacacagcccactattcctccaacaggtactcttctagctttctagaggctggctgctcatcccctcaagaggccttctggtattttggaaaggacaaacttcaaagagcagcaaacagctaggggatgtaaatgaatgaaataatctgattgggacctaaagaaggtcgaggggcatgtggagagctgaaaactgcagagtcctttccaaaagaagtttccagtcctgggaagtctgagcttagcaatgctgggtcttaaatgagagagggaagggagggagggagggagggagagagggaggggaaggagggaggaaggaataaagaaagaaagagagagagagagagagagagagagagagaagccagaaatctaaaatgctgtgtattctctttatccttaaatgctggcaaataattcaaaatttgacttggacagtctttgagattaacaagccactccagccaatgggtttagcctatgtgctaccagtatgaaacccaggaaaaagacctccataggctgtgaccagcttccttgagagtccacaaatctggaatagcaaagagtctctctgttgctcttctactatcgcactgagcagccaggtcatatttcccccaaataactcctcttggatgctattagccaaaatgccttcggttacctctctggaggcgtctatactctgtggattccctgtcacccacctccatgagactttctcatccgttttatgatcagtcaacacaacgaacaaggggcctcagggataacagctcctcttgctagtcactatttcagttcatttttcatgccagggcccagacaagaaagtgatgactcagccaccaagcttgatgcacaagagccatgatacagtcagtgtgctgaaggctaagactatgacggaagtcttgattagctagggtgtgagatgaggtgtgtggatgactgagtgtcagaacagcagatggaactcggcggccatgccagggtggaggttgggctccatgcgtcatcctgacctgcctgggactgattagccatggtggggctccatgcagtctttaattgattgatttgagtttgtggtcagaaaacgactgtaggctccagcttatctataattatcagtaaccagaaccagacttctctctccttaatagggcagggctccccagcctgcttgactggcctatttctcagacttttggtgtccactgcctaatagctttcagtgccttgatgtgatacctggtaaccatcaggaaagagactctgggggaacagatacaaaaggtaacctgcactgctgatccttaattagtttaatagtgtggctgcgtggagttcaagatagtttcaaatgtctcttgttcacaatttagctagtttactacaggtagagtccagtgaaagattaaaataagaattcctgtagctctagccaaaaccagttttttaataaaaaagagaaaaaggaaaggaaagagagaggggggtgggaggaaggaaggagggagggagggagggagggagggaagggagggagagaggaaagaaaggaaggaagagaagaaggaaagaagaaaggaaggaaggaaggaaggaaggaaggaaggaaagatcctgacactaagtagaaactgccagctggcaggaggagtcagaatgtcatcactgggggtgagggtgaggcattgctttcagaccagcagaccagacaaaccaaaccagaaaccaggaagttgctgaagaccatttctccctgtcagctcctcacccctcactgcgtctagtagcaaaccatactgagtccagctttcagacgctggaccttggaaacattagtcttggagcctcaaaatctggcttcctattccctttccatcatgtatgagttgagagacttctaaccaattattctttctattgtatctcattttcctcaactctttgtacatgagaagagtgtgtgtgtgtgtgtgtgtgtgtgtgtgaacctgtgcatgggtgagcatattttggggcataggtattaatatatgtgtacatttatgcatatgacagaggacagacaaccttctatatcattcctcactgtttaccttgttcttttaaaagagagactgaggctcaaccacttaggctagtctggatggccaacaagctcgggaaacctgtttatctctccctccccagatgggattacaaatatacacaccgctgccgccgccaccaccaccaccaccaccaccaccaccaccaccaccaccccaccacaaaaagactgacctcaagtcatcattcgagcacagcaagttctgtctccacagtccatctcatcccccagctgtaagagagttaccacatctacctccaaggacatgaactaacggttaagtgacacaacatgaaaacaaacacagtgtctaccatatatatcctatatttttggttgtaagcctaacatttaatggctgagccgtctctccagccccgccatgtgtatccttagaggtgtctggaagcattattatggctctggtgtctctgccccaggaaaacagtaaatgtctggaataatgagtctcatatacgtgaaaaagaagggagtgctgacagacaggagggagggatggggaaggaggcaaaaggaaaagaagaagggggagcagaaggggggagtggtgtgaggacagcggctcctctgccctctgaagtcacaggaatgccccgcactgccctatggggttaggaccagtcatacagggagctctccatgccaccaacaccccttgctgatacttcagaggtatagacactgagggaacactgatggggaatgtactgtgtatgtttatcttattgactgttaaataaaatactgtttggccaatgagacagcaagttaggcaggactaggagtcaaagagaattctgggaaatgtagtagagaagtggtgatccaggcaggaagtggcatagcaaggagactcatatttaaagaaggagaaacaggaagtgtctcatttttccccttgctcctccagtggcacaatgtgatccaccggcaaggaaggacgccaataaggcatccgataagataaatcttataaaaaatatataggattatgataattaagactgagctaacagatgaggaatcctagtcattggccaagcagcattgtacctaatacaaggttctgtgtattcatttgggcctaacttgggcgggcagctggcgtaaagctcacacgtggcagtgggctcaggcagcttttggaggaaagatttatcataacagaacacctcctgccaggcagtggcagtgacccttgagctagggtgcctctcacttctgagctctcactgtgttttgtcactttgatcccagggatggttctttcagaattctgtctaatatcctagaagggaagtccttggcagggccccagagaggatccttaaccccattttagcagtgagcaaaacgagccaggtctcaagagagtttaaagaaaaaaaggggggaaactaagaaaaaaacctactttaagtctcccagcccagccggggtcctctgacctgaagccaggtccttagccacatccagtgacctcctgtctttctgataaatgcgctgttacagctgcggcatcctatggtctctccctctccccagcaacactgacgacaaggacagactccttgtcctcactcggctgtgccaggtgagtgctttaccactgagacacaccctcagccctggtgctttctctccccccccccccgggaagagggggaaatactggggtgtcttctcagtgagggtgctaacttccttccactgtcctagtcgcatcaagaagccaacagacaggcaagcccggggcacctccttcccattggtgcagcggtgctctctcttaaagaagcttgtgaagctaagtggaggaagagctggtcatgaaccatggcgtagaattgacctgagggcgttccttatgagttaggatctgtgtgaaggatctgtgtaggatatcatgatagaatattctccacccaccctcgtgcagctcgaattcataacggaaacaatggaaaatgaacagagaaagaactggaaagcagatgtcggatggtaacaagtacttcacaaagagaagtaaaggatggtaaaacctagggaactgtctggttttgtaattaatattttcagttatcatacaagatggtggattttacaatggcatttccatccatgcttatccttgcactgtggacatattcaaatcccacacacagacacaccctttcttttgggcccccgaagctcatgcgcctctatcaaaagggaagggactgtttttgtgtacagtgaccagagaagagttgacatttaaattgagatagagtaagtgatagatcccaggcaaacaaaacaagggagaagcaaaggtcctgaggtaggaacatatcaggtgtgtttagaaaatggctacactgaagccaggagcatggaaagagatggcggtaaaaatccaggcaatagagaaggagaataggcgggagagagcagactacacagagcctataggccacagtagctgttttggactctactccgaggatcatctcagtacagtatttaacaaaaaacatggtgttccttgatgtgtttggagactcactatggctgctctgcagggccacgtggaggcaaaaggagatggcagtggctgagacggagctgagggtggtggtgacaatgacaggctgtttctcagaggcactgcttcaaacgagagaccccgcctcttccgtagcacacgtctgtaattagaaacaggaggataacaagagagggctcaggagcctagtgcaggctaagtgaaagaatccgcatatggcttgggggtcttctgtttctcagaaccaagcctccagccttgtgcaaaacctactgtatacactgtcatagaccaagatgtaggaaaagtaattctgagcctacagcagaatgtttaccctccaatgcctcatctttaagtgtttttttttttttaatggctgttataaatacgtcttccagcttgtatcattcttgttagggcttccatgtgccagaaagcaagagataatatgaccagcaaggtcaaaggaaatcagacagagttcaataaaacttggacacatttgtaaaaaaaaaaaaataccttaattgtggtcctgacttctggattatattgctgggtattttaatttgattttttgttcttgtacatttcccagatcaacaaaccaaagggaaatttccagagcttcaattcttgctatccgcctaacagggatgatctgaatctaagatggaaagctgcaattatgaggaagaaatttatttttaaaactatcgtgtggctctcagctgtgctggagacacaggaggtggactttagtttattcaagttcatttgttgtgtgtgcaatatatgtgtatgctgtttgtggtgtgtgtgtgtgtgtgtgtgtgtgtgtgtgtgtgtgtgtgtgtgtgtgtgcagaggctagaggagatctcaactttattcccttgagttagaatcactctctgaacatggagttgatgtgtttgagctatgttgggaaccagcacagcctggtgactcttgtctatgcacaccccaatgactaacattgcaggcatgcatgagaccatgcacagcttcttatgtatgtgctagggatccaaacacaggcccttgtgcctgggcagcaagcactcttactcactgaaacatctctccagtctgcaatttaattatttaaggtctgtgcaatattagcaacagaaccacaggactgaaacgtggtaatatagtctgagtatgacgtgcaaaatgcttagaaccaggagtggtctagacttcagatattttcatatttgacaattttacacctacacacacataaaaacattgatgtttcatatatgcctgacatgcatataatgggcctatctatgagtataatattttcagtgcatttgtattttgactcctatctaacacgtgaggtccagtgtggaaacttgcactcatgaatgatgtcaacataatggctgaagctcaaaacattttggagttggaggcatattggatttagggcttggtgattgtgggtatatttaggaattatggcttgttatagaataaaatacagcacaccaataacattcaagaaatgactacaggacagcaagggattctgcaggcgtcaggtacatggtataatgctctttcccatagagagtgacttatttctagaaaataaatagaaccacttcatacaaaccagtagggccagaagcttggttctcttggcagatgctaagagatggaagctccttcctctttacgctggacctggtgccttcaagttgatttacgcagccattcatgtggctgaacaatccctcttttatgcatttacaatgtgttagttttctctttcatgtccttttttatccctaaatagttgtcaattgcatggatagattctgattaatttaatccactcatctgtagattaactctgggctctttatagttctttaaattgtagacaaagctgctatagacatctacaccattgtaggaacacgtgctagcatttctcttggaggaatcctgaggagctggaaggctgagccatatgacaaatgtgtgtttaccttttaagggactgtcaaatggcttctcagcttacgtagaattatgtaaaataatcagagttatgtatcattgtggacagcttttgtcttactatgtggcctaggctggccttgaacttgctttgtagtttagactgtcctcaaaactttcagcctttccatttcagcctgtatgagcagggattgttggctgtgggccaatatgctgaattctaggcctttatttttctaattttattgggggggtcttttaaaaattgacaaaataaactatagcaaaatttatcacattgaggctaggcaaggcaaacaaaccaaaacaaggaaaacgtctcaagagtaggcacaagaatcaggaacccactcgttcacacactcaggagtcccataaaaatgctaaactgaaagctgtaatatatacatagaagatgtggtgtagacccatggcagccccatgctttctgcttcagtctgtgagttcttatgagccttgcttagttgattcagagggccttctcctggtgccctccatcccctctggcttttacactttctgcctcctcttctacagagattctgagctctacaggaaggaatttgatggagatattccattagagctgtgtgtcccaaaactctggtacctacatggagcctttatccctaaattctagtgagtagtgcaggaagatactctgcaggctaccaaaggaaaaatgtagacaccaacccaaccacaaacctttttactgtagagtctgtcctccctaaagcaatggtggcacagaacttgcaagaatagccaaccaatgtctgatttgacttaaggcccattccacaagatggaacgcatacctgataccttacccttcttgggactagatagcccagagacctaaggtaaaaactaagcactactaatagagagacgggaggggggaggaagagaagagaaaagaaatagaagacatcaaaatgactcctaataatactctgctatgctcattgatcagtgccttattcagtcttcatcagaaggcttctttcttatggagatgggagaagatgcagagacccactgccagacattgccctggtttgttgtaacagccaatttgacacaacctgtgaaaggagacttaatgatgaattatctagatcaggttggcctgcgggtgctcatatctatgaggaactgtcctgagtattaattgatagaggacactatagatgtcaccattccctaggctaatccctgaactgttaaagagtgatgaaaactagctagcaagcaaggaaggattgtccacttacttctctctacccttgtctgtaaatgtgctgtgaccagctgcttgaacttcctaacaccttggtttccctgctaacaagacatgtaacctctaactggaagctgaattaacccttcaccctttccattgatctgcatcaggatattttatcacagcaacagaaatgaacataaaacacatattcatctccaatttaaatgaaagacgtcagaagttgaagaccttatccgtctttgaagcctttccattctgtccatagacatagatcacaacttttgttcccacctctggaatgtatatctcttgctagctcttcttcatcttcacctccaggtggacattggatagtttcaaggctcttttgaaaaacaagcacattttcccctccaacagcaaccccatcagactgtggctttaattcctagactcccaaaacagactgaaatctgttttgtattttagcctcttacacttccaggccttccaacacaacaagaatcgtatttcttggccaccatctttaatcatgttaatccctttctcagaataccgtgtgtgcgaaaaaagaaaagtctgaaactttcatactccttactatgatcaatcacacaaaaatgccccagagtcttacaaagcactggcataggctggattgtccaacagctgtactgacatggagctgagtgctctgtatgcttgtatgttcaacacccatgagaaaaggcgtctcaggcaagcagagtgatagacccagatctgcattcaaagggcaccagatggcatttccaggatcttgtgtcctggaacaaagaaataactataccagagacagagggaaagtgacagaaatagagacagtttataaccaacaatggccagcattgtacaatacccttcagggtacaacagtggcacacatgccttgtcagtaataaacagctctataatttgacttaagccacacttaacaagaggaaagtcatgcacgggactaggaacctagccgactacccagagctggtgaaatcatatatcttggaggcaaacctacaactacaacttttgtaaaccagcataatcccaaacttcatcctaaatatttgtccttatacccacaggtaaatgtaatcccctacccctcatcaaggaaatgtctttttgcaaaagacagacaccatcatagagaaacaactgaaacacagagctgcagagccccatcccaactgacacacctacaatacaacccctgcacctgaggttcagtgatcattttggaagtgagggtggaagattttaagagccagagaaacatggactttgctgtgagactgtgtctcctcggaatttcagaagctacacatataaaatctcaccaacatgaatgcttgaacataagctaaagaaggacaacaccaatgaatatgctaatactgatatgaatggtggaaagctcaggaggcctcaactgtagacaaaaaacactacaaccgactcaggaattttgaaagtgggataaatgcggaagagcataacaaatggttgaccagatcgtcagctctcaaaatatacacatacattataaagactgagcgggttgtatttatatgtttaggagtatgtgtgtgtgtgtgtgtgtgtgtgtgtgtgtgtgtgtgtgtgtatgtgtgtgtgtaaaacaataaaaaggaaaaaaagccatgaattgaaagagagaaaggggaggtgtggtgatattttgtttgtgctttaacaaataaacttgcctatagataagagtgtggagctggccactcgttagccatagatgccaggcagtggtggctgtcacctttaatcccaagatatgggagtcacatgcctttgattccagcactagggaggtggggacaggagtgataggctgggcagagagaagaatataagtggggaggagataggagctctttgctttcagtctgagaatttgtagatacaggatctcggcccactttggcctgaggattcagtagaggtaaaaggtttctcttgtggctggctcctttacttctctgatctctcagcatttaccccaatatctgactctgggtttttatttttaagacctatgagaatttgcactactggagggatccaagggaggaaaatatgcaattatattataacctttaaaaaatcatttgcaaataaaaaggaaaaagcattcccaagaatgaagtggtcccaagaactagtacaggtctaaaagtcagaatgtcttgaccctctatgggtcatttacgtagtgccagcctcctcccacccactcacaacatggggaagctgacactccccccaaacacacacacgtgcttttttgttacatgtgggtggaaaaggttatctatcttcctgccaactgactcctttcatgttaatcaccctatctccctttccctgagccaactcagcatcctccaaagttctacatcccattggcgttagtctccgtcaatcactgtgtgtggtaccacccatacgagggtgacctcagttaaagtaggtgtttgcagctcagacaccccctgtaagaataaagccccagagatctctgccatagcactccaagcacccagggacaacatggctttttaagtggggacttgggagcttcactcttgtgcctcttggatctacagcctcacatacattcagaaatcagttcttttgttgctctgggaaacatttcttctagagaaaaagcaagagagggtagttgatgagatgggagacagccctgatccctgaacctagtccagggctatgacaaacactctgtgatctaatcctagagacttctatatgaaaccgttcaaacatggcaagttcaatttcttctccctctgtgtgaccttgggtagggcctcagtcttctcccaaatagttcctggaaatctcacaaacaagatactactttaattcctcacatccctgtcatatagacacgtactttatcaattgtcatcctattggtgcctctcagaaaccaccctatgatctggttagtaatgcttttaaagacaaggggtaaagcccaccaaaatgctatgtgtgaccatttgagactcagtttgtggagctccatgagggagttggaggtagcaccaggcagctaagctggccccagattccttggcctcagagagtggatgcgataataaatgactgtcataccaaagctgctaagtgctggagtcatttgtcttgcagcaatagataatacaatcaaagacacacattttataaaacatacagatcacaggagagaaaagattattctaacaatcacacatatatgaagttaagagttgtttaaaagatgtctacaagaatattaagtgtatggctaaaaattaaacctccttaatgttttttttgggggggcaggggtgagtgggaattaactgaaattgatttcagaggctaaagaaactgaatagactagtaaccaatggatatatttaaatagaaacttaaatgtttattttgagggggtggggcttcaagacagggtttctctgtgtaactttggaacttgtcctggaactcactttgtagaccaggctggcctcgaactcacagagatccacctgcctctgcctcccaagtactggcccttccaaatatgatttcatcgttccaatgaaagggttcttccaacatttaccatgaaatcaacatgttcatactagtactgagagagaagaaacttagggactcagtcctaagcaggaccaaggctcaggaacatcctggaagatataagaatgtaagagccagagggtggggaggagctctgtaaagtgccgtcctctagacatggcatggccatcacaatcacgattccatagcagtgtgggcatctgcacaagaccagcaaagatcaagccagccaaactctcagtatagatgagtggatgacctccagatccagccccatcctcgggggatactggcaatggatagttgctgggggaagaagaatcatcctttacttaggatatggctgttggtagttttctccagtggatggccccactacatatagtgagttatcacacaaaaaaagacatgaagttgtgtgaggaagacacaggagggaatatggttgagaaaattagggggaggaaaaacatgatcacatttcatgataatacaagtatgaaagtctcaaaaaataaagaaaattaaaaacgctttgatgccaaaaatattaatacaaagatacacaaatgacaatctgatggcatgcccttgtcactaatccttatctaggtaaagagaaagtgcagttacaagcataggtgcacaccttcaatctcaacactcgggaggcagaaaccagagactactgagtccagggccagggctggttatatcatgagaacatattgtcgatgaaacaagaaaaaataccatttcagactgaaatccacacaaagtacacagtttatccaacaaatgatgctgggtcttgtggatccatgagcattttagaactaaatgatagttaccccacactgtcccaggtaaatggcaggacaacaagaaaatgggtagaaaacctgagaccacaacagagaagagttttaagatgaaaactttgaggcatatgagtatttcataaatgggccctaaatggctccatcaggaaagactgacacattggacagtgcattttaaaactttcttgttggcttatttgtttggtggtggtctacctacatagtccaggctggcctagaacttaaaatatttctgctgctgccttcttaatactaggattatgctaaaaacgtcttattgattcaaggaacacttagagactataaaacaagctttagaatgagggaagatacttggtaatactcatgtctgtagccaggcaatttcttaaattcaataaattcatcctaattagtcctacactcctatagaaaagtgagcaaatacttgaactgacacctcacaaaaagagtatctatataaattcaaccttattgtagttagaaaaatgaaaattaaacccttaaagagcttctgctacacactcaagaactagattagaatgaaaaaaagagagactctaagccttatcttgtattaacatgagttaaactggattagcatgggttaacacggtacaagaatgtcttcttttactgatgagatgaaaattaggacaaagctttaagagtcctcagtaacattatgtattaaaattaattatgtatataaccatgatcatcactttcactcaaaagtttatactcaacaagaaagcagccttttaagccaaaaatattcccaagaatatccaaaggattgtgatacacacacacacacacacacacacacacacacacacacacacacacacactgtagcaaactcatgcattgggagaacatgaaatgataagaacaaatgaatggcaactctggtctataacttgaattaattcatccaaaccaatgagccaaaccaagccagacgcaagatttactaataaatgacttcacttagtaaagctggaggaacagctgaattacagtctgagggtctagtgacttggaggaggcattaggagatttcaagatgctgggattttctttcttgacttgagtgctgttaacctatgtcatagcagatattcctcttctttggggtatcatcctctgacacccccaacacatctggtgttccttagataacagaacattgtcacatatccattgacggcatcaggaatgatgttattgggtacatcctacagagaggattatgagaaaggatgccagatttgaactaaatgtgatttgaaataaacaatacacagagtggaattagtcttgggtagactttctctagactcaatctaaaaaggttttaaaaaccaaagcttggaaaaactgctaggagactgaagaagaatcaattgtgttctaaacgcgtttaaattgtttcactttccttgtcttctttaagaagaccaagtaactgtgttattttctgtcagtgaagatacccaaacccagggaacagtgcaacccattttatggtgagtcttcccacctcaactaccttaatcaagatgatcccacatagctccactcagagactcatctcctgggtgaatctagatcaggtcgccttgataatcaaccttaaccttcgaagtcgaccccttgtcagtttgacagcccagtacatcattattaagctatgacctcctgccctacaagacatagcatttgtggatctcaaaatactatgttgagttaaaacaactctacaccagagagcacatgctgaaaatgcacacaaaatactagaagtttcgaagtgaacccaactgaaatgtacagttaataagtgttaacaagaaattgtaataaatgatatttaaattgagattcatataaagactggttttgaaacagtgaagatgactctgtatctggcttgtggtagaatgtattttgtatgtaaattttatctcagtaaattggtaaaaattaatcttagcattcaacaagtaaaaccagctccatgtgatttgtacacttggcagcactgctctcagaaggttttttaaagtctagaaaattcatataacaccgtaactacagattcactgtaaaaatataatatggtttgttgatttcaatataccatcatactccccatggaaaacataaccataaactgaaagacatgtttaatgtaccttcttatttataaagcccatgttgcaggaaggaaggccattgcttggcagctaagagctagggattaccagctccttaactcacaaaaattataggtttgctttcactcaagagttcaaattaggacccttccaagaatttttttgagtgtgtggttagaagaggagactcctcctggagtcggcacgagagggggtttggagacagcaggggtcagccagagaaagccagtgtgtaatcccaagaatggaaacttgaacaaggctgttttaggtggggacatgatggtacacaggagaaaggacacaatggatttgtttgggaaataattagaacccataatggtgttgcaggaaaagggatgggagactccatgctcttggaaaccacgtgcacatggcatggacttgttatggaggtcaatgacctcattcctgctgggtctgagggtatcatcccacacattatgggcaaaccatttcaaacccagtattttttttgcaaagaaatgtcaggaaagagaaacataataaacacttagttctggttatctttaaaggccaaaaatatgtgtgtattttcactaactttctatattttcaaatattgttttataagtattactcttgcaatggaaaaatacagcaaacatgttattatggtctgtgtctaatgataatgaaaaattgagggacaacaaattgttctgttatagcatcctaacttctataaatttctgctgcttttgaaagaaaattgctacatattctagtcttttctatgaataaacaccatggtgtcttcttataccacaaactattttatgcttgttgtgcctttttccactgtgtgtgtccaatctatcaatgtcacctcctacaccctgcaagccacacagaacacagccaccggaggaaacggaaaggtacctcctctgagattgtccacctatggaaggaattactaagatttatgtcagcccaatgtgttcagcgagtccaacatgtttctattcaagaggaaagacaatgtattccaaataagcatggcaaatacaatgaaaatgatgataggtaaccaaagaaactcctttccctccaaaagttaagttggtcttttaaactggtgacaatttaaaatggtccttaatgggccagaagatggctcagttggcaaagtgcaagaatgaggacctaagttcagatccccgacatacacatgaggctgagtgcaacatgtatctgtcacccagtgcaggagaaacagaggcaggaaaatccatggggctcactagccagccagtctagttgagccataatcccctagctcagtgagaaatgctgcctcaaaaataaagtggagaaaagagtaagacacctaatatccatctctggcttccataggtgggagtctgagccctctgcataaacagaaagctccgtttaccaactgtcaactgtatctatcaggaagaaaaaaagttggtatttaaaattttcaagaccctgaccgggcttggtggtacatgcctttaatctcagcactcaggaggcagaggagggccaatctctgtgagttcgaggccagcctggtctaaagagtgagttccaggacagcttccaaagcaatacagagaaaccctgcctcaaataaataaataaataaataaataaataaataaataaacattcaagaccctgaatgcttgcagggtttcattggggcaactcctagccttgcaaaaagagagccaaaaaaaaaaaaaggacagtatttgcctaagtgagtgtgtccattcacataggtgttactaggaggaggctaggtttctgccctgtgtcctccatgtttccattgtcatcctgcttccttccctgactatctcgtctctttctactttcctttctatgatgaaatatatgtgatatttcattcctagcaagcttgtcctactagtgttggtatctttgatggagtcatgaacagttcaggtatttatcaagtataagagagcagcaaaatagttttagccagtctattaaatgaaaacaatggctgttttctaataatataaggaaaaattgaaagagtttccctgagttataaggtagggatgggggaggatgagaaggagaagggaagggaactgggaggaaaggagaggaggggaggggaggagaggggaggggaggagaagggaggggaggagagggaggggagggagagggaggggagggaggggagagagggaggggagggaaggggaggagaggaaaggagaggagaggggaggggaggggaggggaggaggaggagaggagagagagagagagagagaggagaggagaggagaggagaggagaggagaggagaggagaggagaggagaggagaggagaggagagaagagatatggaagggaccaggagagacagagatggttatacagcaggaaaaaatgtagattttgttttagagacctcataagtttgacaggtacccaagcaaactaatgtggtacaactttcaatgtcttgatataataggagttgataccatttagcctgaagacaagaatatcttgggggattacgagccctcttcaataagtcagaagtcaggtgaacaaggggcatcacatcataccatctgaaccctcagtaaccagtgggctgcttccctcaaattccttcaagatctgaagtgctacccagaccgcagccagcctagaaaggcacacatagtaacatagaaagacccaacaggctttcaactccaagagctggtagtgactttaatatcaactttataactaattttatatgctctggctcatccaaaaggcttcctggccagagaaaagtagccttctgtaagactaaaagtcatgaagaaacccatgcctggacataatctgactgacagcctttcctgtggccatacccctccctgacaagagccagtccctcctcctttcagggttttttggtttctgaattgagtagtgagaaacaggaagtccatctgaggacggaagcagcagagtcatggtttcttatggcatttagggaaatgggagggtaggataagcttttctgagtcgaggttccaaaggctcagtatgtggctgcctccctttccagcatagccattaacagctatgatgtaagtggcttcaaggctgggcttctgagtgacaggctgaggaggaggccctggtggtgaacattcatggtggcccccacccaaagagcttcactgaaaaaaacaaagacaagaaagccaattaacattacaagattaaaagagggaaggaaacctttttttatttcaatttaccactatcagaactgaaaagattcaacctccaagaaaactattaatttttacagtgtcaggaggccttttataaactatatttttatgatactctacttgatgttggaaacatttcacactggagaggaaaatttgagcttttgcaaagtggaggaatagcatttaagccatttgatctatttgtgaaagtgctgaatttaagcctacaagtgtctttgaaagccttttaaagagatcctttgcaaggcttctaattaagtataatatcgcactccatcctcccttcatgtgacctctgatcctggtccatgtgctccaacagtgtgccactacaaagacagattgctggggtccagcacacagcccacatatcaacaaagatgcctagcaccccttcctacatgaattactctttgggcaagaagagctgatgttataaaaagaaatgaggacaaatcctgcaagcaaagggtaagggaactggaggaacatggcttacagagataatgcatgatttgagcttccttcctttgtaagtctaccaagatatttttcctaatagcaataatcaaatcaataagtatttatgatttatatcccctatccacagagaaatgacaaaacaacagatatttaagttacatccaaagagttcatgatagaacttatgaaggtctgcccaagatttgagaggtacaggaaaaccgttccatcctggtaggtttcttcacctttcttccgatagaggtcctataaaagaactgcctgtgtgcctgggatgatccaaagtaagaatacccatgtctcaactggagaatcaggaccagtgacctaggacaggagcaaatccaacctgttccaaaagtctgtaagaaaacatgacctgaaatcactttggtaatccaccacagtccttagcctcttctctatcaaggagttcttcaccatgactcagaagttatttcagatgtttctccatgagataggaagttcttggttggcttgtaggggaggtgccaacctttagcctcatatcatggcggccagtgtacccactacaggtcacaggaagagagaccttaaagggcagcaccctttgacccctgactctgcgtaagggggttgtacgtgctcttggctgagttcggaagatcttagcattgaactcaactgaactcgacagcttgttttcagtgactttcctttgccccgctctagggtaggtgctaggagggtacaatgcaattgtaaagtgcattgttagcttcaggtgacaaaaatactatggattaaaaacaaaaatacttactgaaaagagagacaaaatactctttgttgaacgccaatgtggcagaagagaaaatctaggacactttgatcacagtagctgggaacacttccatgcagcagatgggacaacatttgggaatctggagacatctcacagctaatcatcagataaatctatcctttccctctacagagctaagcaaggcctacaagcggccagtcacttcagttagtagacaacttatggctaagtgtgagcatgttttgatgccagctgagtctgtggcatagttttagtataaaggtcccttctggaaaagacgtgtatcacatcccattatgccagctttcccttaccgtaacaaaacacctgagatggtggacacaaccgaggaaaggttaaatttacttcccagttttgaatatttcagcccaggatcacttgaccccattgcttttggccctctggtgagatggcacaccactaaagaatgccagaggtgcatggtgcttacttcatgatagccagaagtaaaaggaaagaaagatgaacatctatcacccacagccccaatgacctaatgcttcctactaagacctacttcgtaaaggtccaccatctaccagtacttcaaaatgaggaccaagccttccatggggatgtccaagagataaacaatacagtttatacctttaaatcattgatgcaggtgaatcatccttcctttgggtatgaataaaaaaccaccgtaaaaatagagaacgtgttaaaatttaaagagctctaagcattattgtttcatgaatgtccttttgctcttggtccactttaaatgaatgtccttttgctcttggcccactttaaaagaaatccagttggaaatcatgactcgtagaaagaagacaacgtgaactctatcctattcttggactcatgctaagaaaacatacattagcttcggccataaattcagtttaaaagttattatgtgttcagttatgtgttttttatgataggaataaaaagttaaaatatatgtttcacttttaataactttctgctttacatcacttaattaacctgtcaactatagacctaagtcactggactagtggagtcaagacatgtatccgggtttttcctctccactggaaactggtcaagacagttccttgtctaacccattttattttccataaagtaaccaaggttgacccctccccaggcccttccagctgccttcatcatcctgtcaatcaatataccagattccacaaacattctacaattgcaagccataaacgtcattcaggaggttgagtgttctcatccactccctggaacactacattgtaacaaaagtatgccctcatccctacccacttattcacataaatgctatcagtatagaaagggattctacagcgtatgcattatttacataaaggcaatattttgtaatcaagtatagctcatgttgttgccctttcccacacacatcatggaaattcatttttttccaaaaacactagaaatctcaaagtagtttcccactctctatctctgatttttctctggagggtatctttttgcataagcccatcgcccttgtacttagagatttccaatccactctccagctgacaaaaccctcacccctggagctctaacatttgccagccttctgttgggatgacccccttccaggaaatccagattgcctctaaacctacaggcttttcctctaaagtagtacagtcaaattagagcacaacgtacttgcaaaagtttgtgtagtggcaaaactgtcatcccaggaagttggtgcccaagagctcaccaacggcaaattatagaatatacatctctcatgaagagcagtgagagatggacagatggattttctgtaggtattttgcagacatggtgtcatgaacatccaagggccttttaactgcctttcctcttggatctgagcccttccatttggtagctaggtatatattagtaggcttcaaggccaatgagaatggcctattccctcataatcagaaatgtgtaaggccaggaactaaaatacataggattttgattacaggccaaaagagtgggactctagttttatctctattgactcactccttaaatgttaattcgaatgggcctgtcagtcacacaagccagaaaattcccctcagcaaagttatctgcactggatactttaataatacagaggctaactgaactcaaatattggcacagtgttctctctatcatcatccactctcatgctgtgagatttgagaatgttgtctacagcagtatgtttggtcatgcccactctcatcgcttgaaggtacccccattactctgtcatacatcctgtctgtcttgatgtacctcctcttgacatcaaggaccaggaagctgagtggaggccagattgaaagcccagtagcacttcctctaagagtcgatagttactgctcaagtggtagtgacggtgaataatggaggccattaatgaaaacagtcttaagtccctaaacaaactatagctatttccagaactaattttcaactgtatgtcttcggttcttatgcctaactatactgtgtattctgtactatggatttaactgagtaaaatagaattggatgaaagcttcagttcatcaacctgaccaaagatgctgattataggagagtggtccatcctcactggtcctcaagtctgcaaatatatgtctagctacccagcataagagcaaagacagctaaaaagaccatgaaacgattatgacaccacatctgcaaaatatctaaagaaaaaacatctacccatatcttgttgctcttcaatgaaagacatctataatttgcccattggtgagctcttgggcaccatcttcctggacacgtagccacaaaagtgaagtgtgtgtcacaaatccatatcatgagagcagttaggggcaggccttctcccctcaaggccattctgcctacacctgaattctaagcatgagcttgaagctgtgagatcttagagactctgtgggggatctatgaacaacaggctggcaaggaatatcaaggggatatagtaagatttctactccagagcaaagcagccactggtgctaaaacacacgatgtcatactcttagaaagccttaggagccacaaccagatatagctaatattctcatgtactgatcaacattccagcctcactacaaacattttaaagaattaaggaagcctgtggacttccaactccaacctgaaatgttaatatagcccttcacaactccatggcagtgtgtgacctgcagaacaaatgatccgtgactgcatccaatgaccaaattttatataatgagttcttccagggaaataaaaagcattattaatgaggcagaatgagtacatgtctccaggctccagcaaatctcagaaggagggaaaagaaataaaaacaaaacaaaacaaaatttcatttccccactgctttcccatatgtgtgttcctccctgggtgaagttactaccaactattaatgaggctgtggtagccgcatggacacaaggcaagtgagtgcacctgcttctggaagcgctcagctggactggcttaaccaaatactgatttcctgaaagcatcttgaggcccctttcggaagtccaggaggtcagtggacagggttaatctcaaccctaagagcaaaacaaaataagggctagggaaaatgactctattacccgtgtgggtggagaacacacagcacagaccaaaaccagggtctcagacccaaaacaatctattcctttttctattcaaaagcatttgaaagaaaaatatagccagctctctcacgttgtatccctctgagaaagtagctgtcaacagtagacactgttttcacaaaataccctaaatgacccatgcctcctgagaaataccaccctagtaagtaatataaggtgggaatgaggggctagagaatggctcggtggtcaagaggtaggaatgatcctgaagatcctgtttgttcctgaatggtctccaagatcagcctgcttcacattaaactccattcaaaattaagacattatgttactagacacatcagtccacaagcctaccccatattccaaaagaaattaagaacaggaatgggtaaaggaaaattattttgttaacaatttggctgaactgacagggggggcactattttctcccagcaagcctatggccatctaataaggcagaagagatgcaaatttgtctctgaggtaagttcatgggttcttttctgaagaagctgggaaacctgaaccaaagattacctctattgtttgttctctgttacaaagaaagatttttacacatgtctggaccaaagaagatgagatctcaatgtgtccccatttttaaaacagacgtgcctcagaggtctgtgggatggaagatttcccagccatcccaggcttcgtccccatgatggatgtaaatgacaactcctagtcgtttctttggagggcagctttaaactcctcttccgtgtgcctgtttaaacactgattttgcaagagaagagagatgactgtctgggaacagagggtcagccacaagcatctatctttatagtattttctctccctggagcctgggagtaaaatcacagttacaatcattgtagggttctagcaaatttttttgaaagccaaaggatagcacagctatctctaataaccttggaggttccttcatttattatgaaaatcaactatttcaccatatcacaatatgcagaatttttaaatcaacatgcttggttccaaagtttaagtaatgactggaccaagtttggcatctagaaagaacctcttaattcttacacaatgtgcagcataaggcatcagtcaacaggctatatacgacccagctccagccactgcctggctttggtgattaaagacttcatggagaatgaacatgtcagatcattgatttaccatctaaggtgtcagtcgcaatacaatggcatgattaggtagtggtcacagaaaccacacagcccacaaaactaaacagaaaaaaataaaataaaatcactgcccctttgcctccagctgataggggaatttggtgggcagcctcaaggagttccagatacttgtgtcttggaacaaagaattggaaagagtgaagcagggagtagcaagaaaagtgagagaatttattaagaatacacttccatgggaagaagggccagagcaacgagaaaggtcggtagctcaaacggctaccgtgtacaatgacctgggccttctgtcacatggtgtgggcttttatgatcatctccattccaagggttgcattgtacatgctacatgagctttccaatattacgtctcattagcatcttcatctccacacagaggtgtgggatgcggtgttacaatgggtaaggtgtggcgaggctctctactggaatgccctggggcgccgctggcctgcgtcaataactgcagccagttttcttagtctttggtaggaatttctccaacttcactctttgccagatttttttgtatgcctacttttcaaaggctttatgtaaagcacttgggattttactctgtacctcacttccctgccccaactgctgtatataactggtttttcagaatgtcttctgccttcagagactccagttcacaggctgttttttcttcgtcttcaggatgaaggatgattgtgtccctgggtggactctttcatcatctggtatcacccactcagcacagactgatagacaacgcatttcctggaactagaaggcatgccaccctattcattttctggggcaaactaaaactgcagaggcatgtgggcagattaaactgcaggcccaagaatttatcaaacatgccagaccaaaaaaaaaaatggcccctcatctggaccctatggagtggtgggtacccaatactgctatggagatagtccttggcttgtcatctaccttcatgtgcatcagagaatgatttcagagaacccccaactctccccagctcagctcggtccccactgttggctcagcctactcagctgtgttctgccatcttcctatttgcccacccggatctgccatccatcctcttcctgttccttccttcatagcctgtatttacctctgcagctgggctttggttttgttcattatcgttatcaatacagactctgcttgcatgtctctccacgtccctgcttctcctgaactattctttggcctcttaacccttcgtggccactctgtaaccaacatataaacatacagagagatgcatttactgtgtggtgcagtgagatttaataatcaagcttggaattaaaggtgttcacatcacattaaaggatgaagtgttcacatcatccagcgtcaccaaggaaagcagaaatatctggctaatggatgccatcaaaccatcatgtccatccatttagaagtcacctaaagactagaaaggatgtcattgtttttgatggctgtgtttcgaaaacaatttcaagcgtaataacagcaaaggaaagttaaaagaattataggctagctctgtcaatctatttcccgggagaccaaacttgataatagccctcgtgtttgattcaaaagcattctctctgtctttctctattatctgttcagctaacagaaactgatgaaaaaacgaacaaaattaattctttcctagctcaatggtttgatttcaattgtttttacttctcttaaccaagtcacttggcctccgttacctaagtcattggagcttagtccaaactggacactcgttcctctaatccgaaagcctcatatcctgtttttcactcattcccctgattttagcagatgttgtctattaatgtgtctgagaacttgggatgtttcaattatggtccaaagaaacaggccatttgcactcttgtgtttccacgggattattattcatttgtcactttctggagtgccactatcaaaacaaataagctacaaattgcacagtgtggaatgaagcatctccccagcacccagaccccgtgtgtcagaggcaaaaatgctacagctgtccccttcttcatcacaactcaccattctcacctacataatatgatccaggcaaaaagatttattcatcatctgacctccctcgcctaggcatcaaaacagggtaaatggagagcagagttctcagtgtgtgttgtgtatatggacaaatagctagcaggaagcatggcctggttgagagtagcacagctggagaaagttggtgacgctgaagccagatgagactgagcctcagccacattgttaagggcctgttaagaccacagtgagccagaggcagtatttgacaggtcagggtaagtgagctgtatgcctccattcactcctcactagctgcctaacttctaatatcaccccatgggtttgtccttaagttttactagcagttaaagacagaaggtaaaacctgtctcatctgatctaatagcgttgttcagaagagcaaatgacaaagtctgcatgaggatgagattctaaaactgtcattcaattcatcataactaatgacccatgttacagtatctgattcaactcatcagagctaaaagtgtttacacacacacacacacacacacacacacacacacacacacacacacgattaacacacttgccgtttttcctatcttctccaccttcacgtatttctaagaaaggaaactactctatgggcttcctttccgagaaagaaggacaaaggtctggaagacaaagtggaagaacaaactggctgaactaactcctgactgaaccaggaagcagaggagagaggcagggagtgctgggtgagttatgatagtttagaaaagcctggcatgaatgtgcaataaggtaggttaagaaggcgatgagcacggaaagacattttacttagcggtttgtgttggaacaatgtgattgtaaaagcataccattggacctaaattgtttttcaattactttaaatttgggggtgcctcattgaatgtactgtcatgctcaatggggccacaacccacacgcactgtggaagaactgtctgtatcccaggaaggcaacccaggacatggaagatgcatttccagaaactgtgcttgtaattcttggcaaggagaagagaaatgagggggttgttttctttacaaccaaatatagaggtataaagtgaaaggcccagcaaacactgctcttttctctctcctctatgcttccataatcaattttagtagaaaaagataaagaaaaaatgaagctcaagaaaaaaacaaaaaaaccattcagccccagcaagaatgagaaatgatggtgcggtcagtgtctaggctgaagacacagccaacctttgtgttctgttgcttcttaaaacaaaatcacacaaataaatctgccaacaaaaaagcatggagggtaaatcaagcaatccagcagactaggagaccgaaaccacaaaaaaggccgggggggggggggagagggagtgggtgggagtccaatttgcttggcaaaattttaaatgtgatatgcaatatgcaataaatctaaattattttaaccacttattatcagagggccattacctgaagcaaacagtcactcaagctgttcacaggtgaggaatgtttgggaacacaaagcaggaacttcaaagaagcaaaaagccaactccttgcaaaattatgtcttgggatctactgtttaagtttgtagtgtttgtgcagaaggattggggtttaggacgtcttgctatttttctagtaagcacagtagtgagtttgcctctgaataaatatcctatcccatccattattcagaaacacaagactggatgtaactgagaacactctcatagcctcctgcagccacccaactggctaaagagaagtgttttcattttagactctgactctgtgaacaggaaaatggatgtgagaaagaactacatttaagtacagactcttcagtaagcaaacacatctatggaaaagctgagatgttctattttaatccttgacagccaccgtaaaggaaaagcaatcttggacacgcctgctggaatactctcttcgatttgttccaggcggtaagcaccagttaccagctctgcactgtttggcagctcccgtcagagtgccacagcaagacacttacattatcccacaagtatcaaaacaatagggtgtgtggtcttacttaatcagtaggatatgccaattctcgaacacaagggaactcttttcttctccccccccccccaaagaaggatggaaaggatggaatggaatccctgaatgatcacaggcctggagaatgacaaaatgctggggtgactgccagttgctgaatctgggcatccgtaaagaaaattcaggtgatgtcatcttcacgtgctaaaaggaaccacgtattctctctgatcccatactgcccacaagagagattcatgatcaacagcaagctcactctaatttgactctcttttgtttataaatcattatctcacaattataagacaagtattatggatagcttatcatctatataaacaagtaagcctagtagggcaagttgtcgttccacatatctctacttctactaatggacacccgagcctggaaatcccagtccccaggccagtgcatatctcatcagaccacagagttttctgaaactatacctccatacacggtgagagtagggttgttttttgtttgtttgtttgcttgcttttggttttgttttgtttttttgtatgagtcccaattaagactcactatactagaaaaacaaaactatctcttaaattattctggaagtaaataaacctattttaagaacaaccctcttttcaagtgttcatactatccttagaaacccctaccctaaattaaaaagttctaattatactacagttcagtgatgacttaagtctccagccaataaacaatgaggattccttcccaccaatacaagtgttagttaccacatctttacgtccaatcgagaccaaaacctgtcagtaaggagatatgaaaatgcacatcacctcataatcagtcattaaccattgacacagtacaaggatgtcctcaactttggtgctcacccggacatatcctgatccatgcaaataagatatggctttggaatatgctgagggactactgattctgggaacctctccattcacagagccacctgttaggtcagttggatagcacaggatggctgctcactaaaatcaatgcaaattcaaatcagggagcctaaacatcctctgtagctcaggaagcttttagaaattgtcctctatcattgggcatttgaaaaagactactttaagaatgtaaccacagtcttttcaactcccaatttacagagaccatgtcatcatccactttgaatactgcaaggccaaattttatagtcaatgaaaaatagggccaaatagattcattaaaggtcaacacagtggaaatatcagcagtccatgacttgtctctccttacaggaagatgttggatgatgcctactcggtgctggcatctggcttccttgttatgggatttgtcagaaatgccactcttaagtcaaacacttcctggtggtgtcaccacagggcatggtagaaaagggaattgtttcatttccctttttgtagtttattttttattactatttgcacatatgtgtacaatgggggctggagtacagcattcatgtagaggtctaagaacaactctatggagttggttctttccttttacctttatgtaggtttctgggatcaagttcatgtcatgacacttgagtagcaagctcctttatccactgagccatctcaccagccctcattgtttcagggaacagtatgattgtgtgatgattgcacatatgcaaatagaatactttaagagttaagtaaaacccacaacatcttcctatccagtcacatcattcattcagaagttggacttcttcctggaagactcatcccaaggagaaaattgttcttgaagtaaaaatctgggtagacaaatgctttttggaggagcacatgttaggttgtcttgactcacaccctgttttgaaatgcaaatctattcctgaatgatcgcttggtataaatccacctcctttcttagaaaaagaatgatggacgatgatacaagatcacacttgaaaggaccatctcccagcagtcctgactcttggcaaccaccagcaacaagtctgtcaactaaactaaagggaaccagagctatgaccacagtcaaaactaggaaaatggccagtggcttcttggtgcatcatgaccccactgcaactcaccatggccttgcattgagccctggaattacacaataacaaatgataagtcaagacccttttctggttgtacatggtagaaattacgatggttgattctaagcctaaaataaagatctgctccagttttgttgaactaaaagaaaagtcattggctaatataaaagatcacagtttagtctatcagaatgaaaaatttgaccttgagtaaaaacaaaatatatgtttttttaatgtaggaaaaactgtgtttctgtgattgtttaatgggaccaacttaaccttaaataaatgtcattcttctaattaatatgttaaaaccagactggcaaggagagtttgagaaatcccctaagcttccttgcttttgtgttaaatgatttaccttcatggggaaaaatagtgggtacaaaagcatgggaatttgtttgctattggacatttgccctaagcacattttgcaaagaaaagtcatttgtgtatggaaaaacaatattctagtcaagagagagtgcctgtgtgttttgcaaccaaaagaatacttacagggctctagattgcttgccaatgttacagggagactttaaaaagttaaaatagcagagattatagagtccacatgttggctgacctctttgttgtcctttctggaagagtgatgagagttaagggtaagcaatggggtggggttccagtaggtgggtcacagggtgttgggttcacatttggttatttcccataattccattaaatgagaactgatggaatccctggaataacactaggaacatctttctggcactcttaaacaggaatcatttgaccaagaactatcccatgacacaatcatggaaacaacaaggcggcacaatcacatgagtgtgaaatacagtaaaaacctgggtgtctacaccaagtagactgtgcctacctactgaccatctccactctctcacagtggggtgtctgggtaccaagtagactgtgcctacctccttgaccacctccactctctcacagtggggtgtctgggtcaaagggttgaggtcttcctgcctttttatttttaccttgatgtattcctcctcagcttccatgtgaaagtccatccacctatgagacttgaaccccttgccaacccctccaactatgccatttcctgtctgcaacttgtgcactgttagctccaatctgtttctagagccaagtccactcctagtctagagtcagacttcagaacaaatctgatggtaaaaatctctacatggttttagccaagtcttaaactgaaaatccagacctactatctctgtgacctgctccttaccccagcatcagctgaggtggttatcacacataatcatggcagttagaccccggaagataccttgaaattttgatccctaccctttatgtcttacagccatcagctcctggtggaaagcttttagaatccacctccctctctccttcccaggcacagtttacctacactactaaagccatcccctaactgcccccaccttaactaccatctagctatccttaaacaactcccaggcagtcaccaacataagggttgatggactcagcactgctgttgcttggtttagaagacgtcaatgaaaacctgcagcattgggcacaaatgctatgccaggcatttggagtgttgtggatccaagaatgaacaaatgtggttgtggctggatcttcacagaactgtatcctgatgaagtggacaacagtgaaagaatctctaacatagacaggcaatgtcacactgagaagcgagaggttattaggaaacaccactgtaaggacggttgtttggagatgacatttgaagaaaaatacaatgagacatcggatgtaaagaatgacaacaggagagaggagtcaaagctatttattggaagttgaccccaatgactcagtctcttcagccccataggtaaattctgcagctctttctggcatctgaaaccctgcccccttctctgctcttttgccataagcttacagcattaagctgacactagttctccaaattccccctcgctctcattttcacattgagctagctctgcactgtaccactaggcggcattccctgtgctaaccatgccacttcttgtcaactcttcttcatgaactctgcctctaaaatgcactccccaattccatccccacctcagtaatcaccaggctcaatttcaatcagtttcctaaattgtcttctctctctctctctctctctctctctctctctctctctctctctctctctctcacacacacacacacacacacacacacacacacacacagtaccctgggcttattttaattacattggctgataatttcaaacataaaagtttaaaatgttggatggtagatatggtttatctggtaaattgcttgccatgagatcatgaggacccaagttcaatcccccagaactcacataaaaaaaatccaaatgtgacactacatgtttataaccccagtgctagggaggtagacacaggaagagccctgggacttgtgagccagccagtctaattgaactggtgagccccatgttcagtgataaaaaccctgtctcgaaaaataaaatggagaggaactcagggagacacacatatacattgtttaactttaaaatgctataagtctaaatatttttagcatatacaagtatagccaggaagtggtgatgaaggcctttaatcccagcactcaggaagcagaggcaaggagatctctgagttcaaggccagcctggtctgcagagatagtttaaggacagccaggactgttacacacatagaaaccctatctcaaaaaaaccgtgtgtgtgtgtgtgtgtgtgtgtgtgtgtgtgtgtgtgtgtgtgtgtgtgtgcatgtatgcatgcatgtatgtatgtatacagataaggggtttggttatatgtccacacaggcataaaatctactttgatgacattgacgccctctattatcctgtcttttaccctttccacatacataaaaatccccctttaatttttatcctacttttcccctccagcttccacgtatgagagaaatcatgagatatttgctttgtggagcgtatttcatttaacatattaataaagtttatgcttcatgtactcagtctgaaatcatgtgcaccccttcagcttcttaaaaaccaccagagcttcatttcaaagtcagctctccttatttctagcactaacaaatggctgtcatctttggccagttttatgggaaagattgttttgaatctttggttttgtgtttctgggttttgtttttgtctttgtttttgtttttgttttggtatccccattaggcacttaaaacacatttttagttcctcacagtccaaatactatttatgggtaattttgcctagtatttttgcctagcaacataggagacttgccaccttatagagatgttaactgaaagtctgggcatcagagtcaagagaaaattccagcaccatatctgattggctgtgtatgctagctccttggatttggttgtgtgaattataagaacataccaaaaaatacttccttcaaaatcctaatgctagatacccattccccctacaacctatgagaccctggaggatcaggctgagctttagggctatgtgtctttatcatctgaacccagtgccagagatatcatgagctcctagcaagtagatcttgactaaagaaaattgaattaaataattccactgcagaactatacagcctgggattttaacagctgaatctgtgatgcttgggccagtaaccaagaggaaggaaaggaattcacttagaaaacatgaaaaccgtgtgccccttctgcctccagccccattcatcatgtttttcttgaatccatccattggcagattgctactttcttttagttgttttttttttaacttttaatgtgcatgggtgtgcttgcctgcatgtgtgtctgtgcacgacctgtggtcagtggaagaagaggagggcataagatcccctggagattgaactggagttgctgatggttgagcatcagaagaatgggaaaccagagcttgcttctgcgatttctttgttctgtgctagttggcagtttctgtagccttattgaactccagccccttcctctgcaagcatggtagtgcacagcctatttgaagggagtgaatataagaacgtttgcctggtatgtggcagagagcaggacctgcccctcttccctccgtttctgatagaaattgttttataatattttcacctgtacttttcctgtacagaaggcttcttaattttccgaaatatgtaattggtttgcaggaagtaaaacttgaacttggctccaacaggcactttgagaggtgagcctcagctggaaacagggagacacattaacccttccggctctcacagcgctatagacaccacacagacctgaagccttactctgtgtgactcctgtacactttcagctcaaagtccgaaaatttaaaaaaaggaaatagagatctgaaacgaggagaggttttaaaattagatgtaagtgatgaatggaaactgttgcttgttcataccgagaaggcctgagtccatgaagacactgagcaaatcatgaaagggacctagtaatagcatgagaacgcaggtggtattattttccaaatgcacagagagcttgaaaggtctctacacttctttccaaacaccatgttattcaaacagccttcgctgcctccaagccctgagtcctggcctccctagtagacagcaagaagctccagggtctgtgtggatggatgcattgttccaaataatcctgagactctaaatccagatccccaacattgtgtgaaaaatccaggggtgacagtgtgagccaaatactatccctgggagacagaacaatgccaggggctcactggtcagccattaggcccaactgctggcccccaggttcactgaaagaccctgcctcaaaaataatgtagagagtgataatggacactcggtggctacatggctgtgcacaccccaaagacacgtgtgcatgcacacaagaatcagttcatttttttcaaaataagatcagaagattatcatcccatttccccttttgtcctccacagggcccactgtgtgtctagtgggatgtgggtagagtatgaaagagtgccagatgacgtaatatcacagcatagagttttgtacagatatagataggccagtgaattgctgagcctcacagtctccaccctctgcattactcaacctcctagcagtcaggtcaacgatgtgtctaactcagacctcaggtgggaagatggtggctgtggcatgtgctgtggggtgaccaataagcacaggtagcccagcctcacacagggaaggagctccatccaaagccctgaaagaaaactctgctcctaagcattgagttttcttcacagaatgtgaaattcttgaggtttctccatccgtcgcctgtggcctctctgagggcaacaggacatcatccagctgcaatgtcactgctctgtctcctcttctggtgatctgaccagaaggcctgtgtgaccaagctcacacggccacaagggaaacgcctgaagcagaaatgagatacagtgagcacttcccactctcatcctctaggtgggcgtgggcaatcgtgactcctttcatatctgcaggcatgcatatgaacgcaaagggccatgtttcatttagctaaaatacacaaagggacggggtgagaagtgatgggaagaaaagaaagggagaagggaaggtgtaggggaagctgtagccacgcctacttaggggctggctacaggtgtgcctgaccacgcttgtgagggcgtggtcagagtgacatagtgtgactgcatttgctctttcggtttcactttgcttcttgctgtacaggctgctgccacgccggctggctaggttgctctgtaagtaaggcttttccctattaaatacccttatatttctacctgactccgtattggtaatttcccactatatctggctgtcagaagcgggatattggaaacccacaccccatttgggacaggctgtgggttccatcgggcccgaggcctaggcccagaaagcaccctctctccacaggtgctcccggcttgcagccgacctgctgccgctgagctgctcagaaccatccacccagcccagagacagtttctagctgcctagaggaaggggtgagaggggcggagagagtggaaagagtcaaagaaagggaaggggtgaggagaagggatgaagaaaagaaacaagaggaagaaaggggagaggtggaggggggcaaggtgttaacttaaattctgcaaagtccttaaatgtatgttctacctgagggtaacttccctgcacgtttcgttaatcccatcccataatatctgcctggtcacaactaatgagcattgagtattcgtcaaaatatgtaagaagggagcacaagcctttaagatgtgtttttatcaaattgctgggggggctgggtcttcccactaccaccaccccccaccccaccctacccctacccactccccagcccccattcctacattcctccctatcctcaccccctgcctgtattccatctatgactttaagactggggcttgggaagagcctgcagaatgggctcagaggaagggatccttgctggagtccctctgaatgtttttaactagggtttcttaatacgaaaccataaaaagcacaaatgccaacttataataattttgcccacaaactatatttaatcacagcgtagtaaccaaataaaacaagactgcagaagcagctttagtgcctaggagaaaagaaaaaagatacatgctttcagagcagttctcccagaatcacactgctgacaacttcagacgaaggcggcaatccaccagccataactcaattttactcaggctccgtgcagagctgcgtgtcacgggtagagctccctcagtgctttaatggtgggttttagaagccctcttcctgcaattagtataatggaggatgtaagtgtggaaacaggagatgttttccctgctcacctaggcaatgaaaatgtttaaaatcgtaaatagtcccaaggttaaacaggggtcacgcagcccatgcctctgcttccataatcgtgcccaggctctgagagaagttcctgctctaaagataattctggtctgaccacagtccacttacatagatccaatcaactgtcgatccacaaacatatagtcctccaggaaatccttcccctgctcgggatggattgggccggactgtgtagccttctacccccagcagggggcggtgtgctttctgaagactgtggccgtaagtgctgggcggtggacagtcttccccacttagcttccaagttgtcgatgctcttgagtttgctctgttgctttctcttaccctagctcgcacaatctctgcacgtgccttacctcagtgctgtgtgattcccttacatccgatggttcttagcccgtgcactcttacaatgtgagaggctcgggagatggctcagtcagtgaggcctccataccagcacggagacctgtgctctcatccccagtggccacgtgaaaagctgggctcatggtgtgtgcctgcaatggcagcactgagaaggtcaagccaaggggatccctggggctggctggctacagggatcagtgagctacaggatcagctagagaccctgtctcaaaaaatacgatggggagtgaatgaagaccccgatggtgacctccacccacacctacacactgggcacacactatgacacactcaaacacaccactagagacacatcacactcatacaagtaaaacaaaaaatgaataaatgagaaaatggtgtttgtgtctgttttcttgctgcctttccaaataagtaactagagaggtcaattatttaatcaagtcctgatggttgaacacctggtaagctttgtgctctatcaaccaccttctagtgagttaattaagacaactgacaaggtccttggtgcctgaaaaacaattcattctgtgtgttaaccaagtcgaaactcaccattctacatttcatttcttactgaaaattaaatattctcagaaaatattcttaaatggctaccaagtaagaatttggggaagagaaattgatagttatagagaaaggaataagaggaatgaaagaggaaaagagttgaagaacagaaaggggttctaaatgagaaggcccagaattccagaggcctcatcgtcaccaaaaactctgtgtgtgtgtgagtgtgtgtgtgtgtgtgtgtgtgtgcatggggtatgtgtgtgtgtgtgcatggtgtgtgtgtgtgtgtgtgtgtgtgtgtgtgtgtgtgtgtgtgtgtgtgtgtgcatggtgtgtgtgtgtgtgtgtgtgtgtatgatgtgtttgtgtgtgttcacgcaagcatacacatcattgtggcttcttgagacaaggtctcattctgtagcccaggacagtctggaactcagtgtataggccagagtggcctcaaattcgggacaatcctccttgggccccccaagtgctggcattacaagcaaaagtcaacatacctggaaaaatcctaaatatgttttgacaatgttttggaggtttacttaggaagaagaaggtttgtttttttttaatttatttgtttggttggttggttggtttttacctgcacttagataataaaactaacctgcttttgaatacctaatgtgctccatgcattcttcatacattttcttaaatctcaaacaattcaatggcaagagttcccatcttacaaacaaagaaacaaacgtttggggaggttaaacaatgcgtgggaagacatggcttccaagcacatgctacttgtcacataatccctgcaccaacgctactagtgccatgcttgccaaccccgccggacgacccacaacactgcctgcagggctgtgagctggaaagtcagttagtcctgtgccaacttctggctttgctctaaatacttcactgccctgaccagaactccagttactctaacagagagtagctttccttggtttgatatgtacacacatgtgcatatgcaaactgcatgtgtgtgaattcaaggatctgtgtgccaagcatgaaaagaaaggtcagaggacagcctaaggtctcttcattgttctgcagtgtacccctgtagagagctgcgtggagccgcaccttaaagatggcgctcgctggcttccgccctctgcgatcccgaaagcgagcgctctctgagaaaaacaactccatatatggctaaggccagactcatgcgatgatcataagctgcttgcatatgcgtggacctatggacggtgcctacgtggcaatccagggttggtggtccatgcccagagagagatcgctgttaataaggttctgaataaactgctttcaagaagagctccggggttgcgtcatccttgctggtcgaggcggtcaggacataccccaggcaggctggcctgtgagcaccagggattctcctgttcccacttcccatgtcccattaacacactaatgtaagtcatgtttttgaactcagaacacccaacagctcacagtagcctgagtcttggtgtttagaacatccaggcttagcgatgtctccccagctgggacagcctgttcccagcaccctccacagagttggaaatgggctcagtacccagtgtgacttcatttggtgctgtcagagacagtgactgacctagcactagcctgtaggtctccatgcatgcaggtgacgtcaaagtgaattgcttgaagtatatcctaatagaaatggatgcaattgttgacaaacacaaaaagttaaaggaaaatgggccacatgatgtcttaggataagcctgcaaagcattacacacacacacactcacacacacacacacacacacacacaccacacacacacacacacacacactcacacacacacacacacacacacacacacacacacacacacactcacacacacacacacacacacacacacacacacacacacacacacacacacacacacactcacacacacacacacacacacacacacacacacacacacacacacacacacacacacacacacacacacacacacacacacacacacacacacacacacaccacacacaccacacacacacacacacacacaccacacacacacacacacacacacacacacacacacacacacacacacacacacacacacacacacacacacacacacacacacacacacacactcacacacacacacacacacacacacacacacacacacacacacactcacacacacacacacacacacacacacacacacacacacacacacacacacacacacacacacacacacacacacacacacacacacacacacacacacacacacacacacacacacacacacacacacacacacacacacacacacacacactcacacacacacacacacacacacacacacacacacacacacacacacacacacacaactcggggagggggggcaggagagaaccctctcattcactttggcatcatgtctgccctctgctggagttcctttatcttaaagtgcacccttgcgggtggctgctgccaatcaagctcactcagacgggccatagtgttctctacatggctttcattaaggccaagcaaataaaagcctcccctacccaataaagatttgcttatcgatttattgttgagaacaggttccatgtagcccaggctggcctggaacacgatacacagctaaagatgacccttctacctcggccatcaagagtccagtagtactgtgacacaccagttttgtgtggcactgggaatcaaatggagaacttcagacttgctaagcaagcagtctaccaacagctgctttgccagccttttatttgttattctttccttttttcctttctttgttctccaaataaagcgcatttgctgcaggcattgctctgtgcatcaaaaaccagccgagcatactagaggcccacgttcgagcctagtacctcctaacacagggtggtggaggcagcaggggcctgaaagggagaagctagtggctaaggagaccaagtccctccagcttggagctcacctgggctacatgagaccccaaaacaacaaagctgtactcagatgaaccacatgggaaggggagttgatgctgaggagggggccgatgagccaaacaagcaaagcctttcctagtgtggatattaccgtcacttacaataagcagggaactggaagaaaagtgccaccgccaaagcgcaactgaacctgcccactcccctgcccgtcagagttacgttccacacaagtttctcccttcacacaagggaagggctgagggtctgcctgccgtcaggccactcacctccagaaagcaaaaacaaaggcacattttgcaccagaaatcttgctgtggattagaaccctcttctggtttttagcacactcataaccatttagcccaagtccctagttttacaaataagagattaaggggcggaggaggagagtgaggctaggggagagctgggctcaccaggtagacttcagctgtccttgtcacctcccctaacaaaaggaggggagggctcccagtttcttttggttgacagtgggaggtggggctcagattgcagctcaggctaggcatgatgacatcactgagggtcagggtcttcccaggcagctggcaaataggaccgaattgagccttagggtgggctgagggttatggggctgctgaagagaagggatgtttgccaggacagctgtggaatggcaaagaagactgtgtggcttaaggttcctctgagttctctgaaaagaaacaaagaatcagttcttcggctgcgcgtatctggtgtctggtgttctttgctctctggctggggctctgttctttttcctcctctacatttaagtaggagggacgaaatgactgggctccagtgcatggctccttatccaggagtatacgcatagcacaaatggaaattgagacagtttttaaaagaaaagaaacagataaggttgggggaattagggaggtgggtagacctaggatgagttggaggaagaatcaaaatgcattatatgaaatggtgaaagaattaatagaatgtttttaaaggtggttggtggtttagcacttggggccttagccttcaggcagtgcctagtcttcgagcgccccctgccgttcacctctagtactccgcctttctcgagtctgcttagcccctagaaacaggtttcctggctatcaaggccaaccacactgatgctgtgtgctcaacaggaaaagcttaggaaaaagcaaaattaagttgataaaacttgtttcctgtaggagtgcctcggaatttaaatggaatgtggcccactaggtttaaataaacctttcatcttaaactttatcatgagaacggcgctgtttattccgctggtgatatctcttgtcgaaatctaaacaggattgcttctctaatgggagcaggacagaaagccttgccaatcaaacagcaaagagaggccgccatcagacagctggtctctgttttcagggataaaacccacattcattcactcaggccggctcgaaatttagaaacaatgctcaaagtagtcagcactgcgcgacagttccctgggtgatcacttgcttcatccattttctctctcttcttaaagagaaaagggggaagcccatagaatctaaagggcacagcaaacaaaaagacaagaaaactgagccctggaatatatctgctaatgaatccattcccagccacctttgtggctttagtttggagacaaggtttcatgctgtcaggcaggtccttgaaatcgtgtgtgtgtgtgtgtgtgtgtgtgtgtgtgtgtgtgtgtgtgtgtgtgtatagcagtattagtgatttttttgtgcacctgtgggcgcagtatccctcagcaatcagaagagggcctctgatccctctgaagctgcaggtaacagtcatcagtcccctgcttaagggtgggctgggaattgaatcccaagtcccctgaaagagcaaaaagctctcttaccccctgagccattctccaagtcctgatgtgacttctgcacatgcctaaattctaataatttctggtttgcttagcaggtaaggggaattttcagaagcagccaagttgtggattgatttgatgttagtgtctctcagatattcaaccaacctgttgtgtttcagagaatcctgccactcagcttttcttaaactatttccagaaacccccttgatcacttagagtttttgagaccaccttctggttgctatcccctgataggtggtaggtgttgcttagacacaccccagcctgatatccaatcgctttttaagcaagacttcattagtcataagcacaccaggagagggttcctgtctcccatgccaagagctccaggcattgtgaaaggtaataactgattgtgggggaggcccagtatgggggctttgcccatcacagtgcaatccagtgaggattatgaacccctttttacagcactccggtttctgttacatcacgataaataagtattatctatttcaaaagagtgataattttaaaagaaaacagggtgttgaggggaaactgagccctgaaagtatttaccaatgaatctgtttcagttacatttggggagggggtgtgatttgtgacagggttcccgtgtagctgaggctagccccaaactcactatacagctgagtctggctttgatctctccgtaagaggaggcagctctacatgggctaaaccgtaggcctgtcccccttcaggaccagagtcactcatgtgtagttggagacagctcggagggaccactgagggacctgcacattcctaaaggatatgcgagtaaggctgtctgtgcgattactctaacccagcagttctcagccttcccagtgccgtgaccatttaatacagttcctcgtggtgtagcgaacttgatatttgcaactaggaagcagtagcagctgatgtccacagagccttctgaagacacacagccttctggtgctcacactattaacccacatagctatgaagtagggtgacacagtggtctgggactacccttcacctctttcattcctggtcagttaatgccagttctggcagtgcagacatatttgtaatagatttcctcggtggaaaaatcctgcagggagaactgatgcacctatgagtgtgcatgggaggctaagcatgcatgggcagaagtggactttctccttcctctcactcttctctctctttagtagtcccctttccagctcctaagcatgcttttgggagaaaaccccaggttcttggagggaaagctataggcctgttcttcatttcatcccaaaaggtccagcagggcatggctaccagtaaggcccatgagctcagttgattagaatgaacttactgttcccagatacacttgactgataaggctttatgacgccactcccaggagctgaccttctcatgtagactagactacaggtttgtcttataccagagggaagaaaactgagctgtggaattgtgagcctcaaccagttggggaggtgtgggaatcagcaggaagggttagagcagcagttttcaagctgtgggtcatgacccctttgagggtctaagaacccttttacaggggtctcatatcacataccctgcatatcagatatttacctaaacatctcagatgagcaacagcctgcctgctttggaaggcactcatagaagggcggcggcgccgcctccctgcctccagttaaactcgttttggtgtcgggaagctccccctgtggtcagcaccaaagctaattttcttagaaatgctcaacgcaggttatcagttcttacatgacgaccaccgagcagcccagtgggaactgcttctatcccaaccacgaaccacaaacagcaaactgaagttctcaccagtcctttgttgtacaattctaactgcttcttcagcaagtgatgtgacccagtcactcactggcattctcagttagatggatgttttagcctctttcctggcgctatgataaaatattctgacaaatccacttaagggagaaagggcttattctgactcacgggtagagcccatcactgtgggggagtcatggcaacggaggcttgaagaccccggtcatagcgcatctaaacagacacagagagggacggaccagtgcaggccagtgctctgcttgcttttatatgatccgaaaccccctcccagccaaaggtccccacccacagttacgatgggtcctcccacatcagctaatatagtccggaccatctccgcaggcatgcgcagagtagcctcttctgcactgtggatggtcaacccttctggagacagttctcttagtaaactcatcaccctcatcttttcccctccacccgccctggtagccaccccagagacgtggacacgggaaagctcccatcaacctgtgctgactcacagctgtgtctctgcccatctgtttttctttccatctgcctgttgacctcacaggacatatgatgaatggcctttactgtgaggtttctctaaacaccgtccataaacaacaaccagtccccccttctggggttgcttctgccttcagcataacactggtcctccaaaccaggcccatgaacaccctccaacagaaatgtccaaggtacttattgttgctgcagaatcgcaggctccatccacccagagttcctaggtcagaagctctgaagcgggggcgtgggtttccgcacggactgtagagtctcctgagctccaacagctatgatctctttgtccacagccttctgagtgaaaacagtagcgacggataattatcagcccctaattctgtgccaagtactattccaagcacttcatacatgtactgactcatttcattttcacagaaacttccagagagtagagttatttcctcatttagacattgattattgtctctacaatagtcctgttaggaagcttgcctgatagcacacagctaatcaatggcaaagcaaagcctccaggcagtctttccaggtcatgtctctagatttagttttctcaccctcagacaactctttgtcctgcctcccatcctaggttttgaattcactaagcataagaattttgcctctttgggctaggaagatagatggttcagtaagtaaaacacttcccacataagtgtgagaaccttgtctacacacatgccacacacacgccatggcagacgactggccaccccccaccccaagcttcacacacacatattcaaatgattaagggaaataatttagtgtcttcaaattgataactgtgtgcatgatatagtcaataactgttcactaatatatttagtgtaaggactgagagatggctcagtggtagcacacttacttacttagaaagtgcaagcccctgagttcatccccagcactgcaaagattttaaaccaagtcagcaaagacagaagatactgccatgttttagatgtggataatatcttcttaaaagtttcttcctgtgtctgtgtatatgtcacctttgaaggtacctagggagaccagaagaggatgtcggatccctagagctagagtcactggcagttgtaatcaccctgatttgggggtgctgagaactgagcctaggacctctgaaagaccagcaagtactcttaaccactgagccagcctggatatccagcaccctggataatactatttatttaaaaaaaaaaaaaagcttatattacaaaacaaataaatagttcaacgcctcgtgaaacaccaaactcaattgcatctgctcttcatgagccataaaaaagacacaaataaatgagttcagcccagaaagccaagtcggtaacaggcctgagagcagcaggcctgagtctccagagagcttctagaaaatttcaacctcattttcatgtccttgacctcagtgtaacttcaaaacctaataccatatcagtggacacagaagcacctcaaggactgtcatcccccgtcgtcctctttctcatctatcacctagaaccatccccccaagctgcttgggagaatcaaaatttcaaaatctgtggagaaagacccagctttaccacagggtggaggcacaggaggggcagcccttctcaaggacagaggtgttcattcctgtcaccctggtgtgtaaataggtagcctaaggtcactgggaaggtggggctggggagaggacacagaggttaagagcatttgctgctctttcagcggatctgagttcagttcccagcacactgccagctagcaaccatctgtaaccaccatcccagaaggtctgataccctcttctggtctctggggacacaagatacacacatggttcacagacatgcacaaaggcaaaatactcatgcatataaaaataaaacaaatgtcataagtatgaccagtcactcctaagaagaaaaagaaaacctctggcctgaatgataaccagtccacatgctatttacagagctgaccctagtctccccttagccgaaaattcaaataagagccaaaaggcatcacactggccactcagctataattagcattatatttacagtctataattacacatgtatctatctatacgtctacctatatatacatacacgtgtttggattttgttgttttaatccagacttttatgtagtgctgcaaacccaggacctcacacaatctgcatttgtttaatattattggcacatatgcccaaatggccatagtcctcggacatctctgccatcgcctgacctctggagtcctctaggttctcacccacgggtcctgtacaggacgcccgtggaccagttcattccagccagcacacactggtgaccctaatggggtgtggaggagccggtggatttcacatcttcaacaatcaggagaccccagcaaaacaaacctctactccccagaaacagactgccctctgcctccagccttgttagggaaacatttttctcttttgtagagaaaatatatacatatcaccctgcaagagcacgtgtcatctaaactgttggagtgtcagggacagtttgctgcctgggacttggaagttcggaataaacactcagagaaaatagaatgcagacagacaagctgttgtgagacacgcatgaagcagcatgctgtgcagagcacagtgcagcagcttgcgatgccaagacagcccaggcttgtggttaggtgggccacaacagtcacagagtcgtctgatggggcgagcagcaggcttgcccatgcctttcagctctggaacattaatctcttgttttccatttgcaagactcatcacgaaactagtgaaggggtgtgtagctcccctgtgtgtgcagcagagctcactgagctgaaaggaagattcgatgtgttccctgtccccttctgtgagttgcttccacactctcctgccaaggaactcaatggctttgtaaacagcggcaggaagactgagccagcctgagtcacccctggtgtggtttggacctgcaagggggaagcactctgtgttcattctgatggctttgttcaacccctctaagggaggcttacccccaaccctcagaaccaccaacacaaaagcatttgtctctcactttaggacttttcctggaccactcaatacccctggctgaggaactcgtctcttcgttcagggaagcatccctcagagccaagcgcagttctgtaaatgattcatgcaggactggagatgagtggtaagtgggaggctgacccagaatcagctctgagcgctgtcttccatccctggcagatctgtgacttgaagatgctcttccagggtgctcactgagcagcgcctggctccaaagacagtgtttgactgtgatcactgtgattttacttctggggttattctttcagtaaatgcaatgtgttggggtgcagggctgaggcccatgacgtgtgccctacaacgataggctacaattgtcacgctagattagtggctctcaaccagtgggccgtggcccctttgggactgaatgaccttttaacaaaggttgcatatcagataccctgaatatcacatacttatgttatggctcatatcagttacaagatcacagttcagaagtagcgacaaaataaccgtatggttggggtcaccacaacatgaggagctgtgttaaagggtcacagctttaggaaggctgagaaccactgctgtaaatggttgaggagctacagtctggccttgggcatctttttcaataatggaagcagctgtacaggcccagcattgaaagcctgggatccaccagccgttggcatctctaaacaatagccaggggaacttggcgcggtggtacagctcggcccagtacagactccaaggtggccagctagcgcctccctggcttgtattcccgcgcagtcccatgctagtggccctgagatggcacctagctgaggtgcaaacagcagtgaggaagcatcccagacccgatgccgggcttcaatgaagctgagtgtactgaataaatgtaatggggcagggcggggccgaccctgactggccagtcccccttgcctcagccctggcctttgccatgggcccccagccccaaactcctggtttgcggcttctagagccatggctaggcttctcctggccccagcccccactaggcctgagttccagcttagtttcagttgtttctataccctgttaaagcaggaagaggagcgagccccagccagtcaggttcaggatgacctaaccccctcctggctgcttataaaaggagcctgtgtgctcccctggagtcccagccattttgctggctggctggcaaacctcagaatgctggaatacacacgctcttgctgattgtatatgagagtggtggtctctgttttgtggggtgatccgcagaccctaacagaactcaggactggtacacctgaatattgtgccagccagtcagcaaaatgtacttgtcacatctgcctcatctatagatccaagattttcacctaaaaaggccattcaggcactcagaaggcagaggcaaggggatctagaatatgaggccaatctgagctacaaccacttcaaggaaagcctgagttgtgtagcaaaacactgcctcaaagggggaaggggaaggctggggtacactaaactatcctacaaaccccctgggtttgatcaagaccacaaagaaggaaggagggaaggtgggaagggattgtacatttataaaataaagctccgtgcaaaacaaaacgtaccgcactcccagtaccaccaataggagccctagtcaatagtggtcagcatgggccttgttgcccacatcagaaaatgctacctcagatgagtcagctgttcaccctaaatcacaaggcttcacagcacagggccacacttggcctggaatttccccacatctgatgggggaggtccttctgtgtatatgtttgtcttattgattgacaaataaagtattgttggccaatatggaagaaagttaggtgggactaggagtcaaggaggattctgggaaatgtagtaaagactgtcatcaccatgtgatccccagaagaatggacacacgctgccagaatcctcgataaaataattctttataaatatatagattaataattatggttgatacttaagacagagatagcagataaatcctagtcattggccagcagtattgtacctaatataagtctctgtgtgttacgtgggaccttaacgtggtactcaggtgactggtggaaagatttatcatcacacacatcccccagctgtgatcactattaaaaaaaaaaagaaaaaaaaaaaaaaaaaaagcctgagtcccagaacctccctggaagagacgtaagttcccaaaatcactacaaagtcttttgggactcaaacacccatagtggttacacaaaggagaagttcccacagctgcttccagatactcatgggcagccaagccaccctgccacaactcctttcaaaggtgctgtcagacaggcagttcttagtcctactgtgtgtgtgtgtgtgtgtttgtgtgtgtgtgtgtataaaacccaggtaggcagttcttagccctactgtgtatagccctgggttagactccaggaaagcaagaaggagagaaactgagcttgcacctatgttagaatgagttaggtgtaaagggacaagccaggaatcctagctctgccccagtttgcttcctggcctagggaagcttggttttcaagggctgggagttgttctgtttcatgatgaccatggcctcagctcctcctctatgaataagaaataacaacaacaaaaaaatgggagctagagaggcagctcggtgactgagagccttgctgctcttgcagggggttggagttgggctcttagcacccacattacgtaactccagctccaggagacccagcaccctcctcttctgccccctggatgctcaaatacacatagataaaataaaataaataataattgttaattaaaattaaataattaaaatacccacttctaacaggtcattataaaaattaaataatattgaaaactaaaccacatgttacccagcatgtggtaagcaccaaatagcactatgaatgtttgtattgtcattaattatatgtttataaaatgctcagagaataattttgccaaaatgtatgcactcatttcctgtattaagctaatctgtaaagggaatatgcccaaagtacatttatatactttcatggaaagggtcttatataaaccaattagtatgtttacaacaaaaatcagacaacctaatggacattaataaagtacttgatgctgtataaggccccaggcacagaagaagcatccagtacagtgtcagtgcagaaagatgctctgttatacaagtttaagtttggtttggggtatcagttagaactcaggaaactaagtgtgacacaaacccatacacacatgcatgacccacatacacacaaacccacacacacatgcatgacccacagacacacaaaccaacacacacacatgcatgacccacatgcacacaaacccacacacacatgcatgacccacatacacacaaaccaacacacacacatgcatgacccacatacacacaaaccaacacacacacatgcatgacccacatacacacaaacccacacacacacacacacacgcatgacccacatacacacaaacccacacacacatgtatgacccacatacacacaaaccaacacacacacatgcatgacccacatacacacaaacccacacacacatgcatgacccacatgcacacaaacacacacacacacacacacacacacacacacacaacccacatatacataaactcacacacacacaagcatgacccacatacacacaaatccacacacacacatgcatgacccacatacacacaaacccacacagacatgcatgacccacatacacacaaacacacacacacacacacaagcatgactcacatgcacacaaacccacacacacaagcatgacccacatacacacaaacacacacacacacacaagcatgactcacatgtacataaacacacacacacacacacacacacacacacacacatgcatgacccacatatacataaactcacacacatacatgcatgacccacatgtacataaacacacacacacacacacacacacacacacacacacacacacacgcatgacccacatgcacacaaacccacacacacatgcacgactcacacatggcccagccacaccttgactggtcttcatcctttgtcctttgccgaaagtaatgccaacctcctgacccattctcatgagagtttgccaagcaattaggttttgataaaaggatgcaagcttaagtttgacagtcttggaaaagaaatagagaggggaatggcaagacataagaaatttggattttttttaaccgtagcacttagagagacccctgttcagagcttcaggctgtaggaatggatatccaagctttggcagatggaagtgttccagccaactacccagccattcagccattcagccattcagctattcacttaataagtgtgccagggtagtggcactgaaccatacaaccctggccctgacttcagtggtcttacaaaccagcagaagtggccaatatccaacaagtgagccaacaaaggaattattccagagtgctaagggccatagtgcagtacaatataaaatagcaacaacagcaaagacacatgtaaaatgacaaaaggaggggctggggtgtcgcacatatggaataccgagagggaggactttgctgaggtggggtgggtatttaaactgtaggattctttaacatacacttttagttcgttaaatatggattcattttcacgtacaacaaaacttgagttctcctaactctttgataatgccatcaccccattataatttcacattcttagacttcccaatgcactgaagaagtgagcacaggctacccatgttctgtggtgaatactggtcatagctgaccttgagttaaggactcaccagcataacaattcttgactcctccatctctaaaggggtgggataaaatgaccttaaatatgcctgctgcttcaaattaatttgttcaaagcagaagcaaaggctgtcttaacctctcggggcctgaagtttacctctctgactctagagacagcctggtgtggagtaagcaggctgaacacaagagtactgcagactgagacgtagtcatggctctaaatgtcaatgctttgttgggttatttgaagagctgggagcctaatgattgattgagtcatttatattatcagtgcttccttcctataacagaactgcaggacaggaagccatgggtgtgagacctgaggcaagatctcagaaaccatgaatgagcattctctagcccagtggtcagggtgaaccaacctggaagtaaaatctgatctgtctggaactcagatgtaaaacctgttctgggaacttgaggctactgaaaggttttcaattgaaaaggtgtttacccacttgatatgaaacacattgtcaataggagcctcaagaaaccccacccccacccatcgctgctgccatctgctgtgtataaggctcaggaggggatgcccgaacaaagcttaattctactagatatatgccctgccagtgaagaaaagaagaaaaaaataattaaacttctcacatgcgctaaattaaataagccaacgtctcagtaaataaagtccacaggcatccggccaggttgtggtaactgtgtttaaaaaaaaaaaaaatacccaacgttcagaggaactgaatgcagggacttcaaactgtatggctttgtggggattcacaaggagcaaatgtcatggggtggcactgttgccttccttctgtccacagaggtaatgggatgcaagattaatcagagaccatctaattccaacctgatttctgatgctttcagagacaaaattgctctgagcaaagtgacaatgcgttcaaattgggagttcaaggcttaaccaagtctgaagaaacctaaagaggaaatggagacagaggagcaagaggcggggccagtcctggcagccttcttgtttctctgagagctctcccacctcctggccattttcactgtgtgtaactgaggacactctccattctgatcgcttcctgagaccaagtgctttccttggaagacgttagaaacgcaaatgagaatgggggcagggtgtgaagacaggcagccagcaggtagccagctccagtgttctatgtacacaggacacccaacagaggaataatcgcttgctgtccagaaacatcaataaggagtgatggtggtgccttgttttttcaagaagaattgctccacttaagtgttcgacacaatttgtatgcatctatatctcacatgctgtttttaaaatgagatggacagaagaaagaaatgaaatggggggaggggtttctccacataaaagcatgaccaaataccctaaaatgttaaatatttggttacaactatttactgaggtttaagccttgtagcctgtttccaatgatttatatatactccattttgctcctcaaagaacagtagcctgggctggagaggtttacagataattcagcaggtcagagagcttcctatgcaagcataagggctggaattcatacccactcccatttaatacgatgcctgcaaccccagtactgatcgggatagagacaggaagatctctgcagtttgctagctgccagcctagccaagagtttgaacaccaggtttaatgagataccctgactcaatgggatagacacagagtgataaaggagggatggatatactcgcccctggcctctacatgtccacaggaggacacacacacacacacacacacacacacacacacacacacacacacacacacacacgacgcacgcacgcacacacccatggggttggggtggggctataatttccgcctgagaaacaaaaacataatagaaaccctgaggtttcgttatagcttcagaagaattgaatgtctcctcatcttctcctggtttggtaatgtggaatactcctttgccaagcagaaataaatattaactgcctgatgattggccacggatccctgcaggtaaaagctagacatctggccactcttccacctagcaacacagaaggaaactaccaagagtcaatggagaatgggatttccctttgttcggggcacaggagatacaaaaaaaacgcttccaaaggtagatggtgtcagaaatcgtttttagtgactgtttctatctctctgaaaagggggtggttcaaatccacatgacacattccctctttccaggctagtctagaaagacttgtgtaaaggattcaactcaaccctgccaaacacttacttggaagtactttattcaacattatctcctgtttaaacttgcacaggttacctcttttaaaactcttttttatgaattacgagcatacacacatgcggtgtatacgtgtggtgcatacgtgtgctgtatgtatttatgtgtacaagtgaccctgtgcatgtggaaggtagaaaaaaatggtaggtgtgctgcttatcactgtccacctgagtccttgagacggggactgaccctagagctaggctggcagccagcaaaccccagtgatcctcctgtctccatcctccacagtgtcggggttgcgtgtgtgccaggcatgcctggcttttcagatggataaggagaattcaaactcaggtcctcatctttgcacagcaactgctcttacccatcgaaccatctccctagccctcagctctccacagtttgtaaaacaatctcatattttggaattacaaaggtaaaggtatagaagagagcaaatgtgtgacagcagagtaagcactaacacagtcttctggggtgggggtgttggcctacttactgtaacagcctccacatgacatctctgggtactctgccagactgtgaactcgacaccccgcagcatctgattttggcaagcatagatcaagacacacaacggcagccaacacttgcctaggggccatgtgaaaaaagaccaagtctcaattagcagggcaagaaacaaggtaatcaattaacagtctggctgcctccaaccctccaaattaagatgcctttaaaagtacaactgatctctgtaaaggagcattctcccccagcacctcctccgggaggcgagattataagaaaataattgaatcttctatatttctggaaagcactcagcatgtccaggtgtgatacagatggtgagggataaaaggggaagtatggttcacgaataaggcatatgattatatgcactcataaatgccaaactctcctcacttcccggcaagacttcccacctctcccgaaggccactgacagtaccaatgtcccacaccccacacctaataaaaatccccaaaggaacagataagtcaaacaatgcacaataggccgagaaaggactatgggaccagactacccacatgcatactccatgactgtaacttacaggcagagagaaaacgggtaagatctcccagcctcacacctatagaatagggacaaagagattatctttgcctggagatgatggtagaggaaaaaaaaaaaaaactagcccatgtgtggaaagcaactagcatggtgtctgggagcaagtgttactctcagggtgtaattgttaatttgccttgttccctcaacaataaaggcaaacagagaagaaaaaggatggaagaaaaaagaccaaaagaggaatagggagatggcatggcacttaaaggacttgctaccaaagaaaaggacaggaattctgatgcatagaacccatgtatttgcaagtatgcatggaacccacctgtaattctagcctcagaaggcaaatgcaggagattcctcagatcaagctgactacacacacacacatacacacactcacactcacacacacacacacacacacacacacacacacacacacaagagcgcgcgtttgtttacatgtgattaagaacactcgctgctcctgcagaagacccaggttctgttcccagtgcccacatggtggtttacaactgtctgtaactccagatctagaggacccaatgtcctcttttggcttctgaagacaccaaaaaggccacacttcctaagccttcccaaacaatgccactaacctgggaccaagtattcaaataacccagccttaagggagcatctatcattcaaaccaccacaaccagcaggacccaagctgagactgggacaagattacagggccttttatgtcatgtttaaagcatttcagctgattctaagggaagcacatagttatggtatgggtgcctactgagacccctgtagccatcacacaggggctaacagtgaatggtagtgtgggaagcctcaaggctggtgtggtaaggaggaagcgttcacagctgtggggactgtgaagacctgtctcataggccttcccgtgttcttcccaataagaaccgtaagtgcagacccgaagttccagactttcaagtatctgggatgacagcttgtcattgaaacttaaatttgatgtgcatgtgtgcaatgtatgtgtatacgtgtgtgtgtgtgtgtgtgtgtgtgtgtgtgtgtgtgtgtgtgtgtgtgtatgcaggtatgtgtatccccatatgtctgtgtagaggacagaggttggtgtgaggtagctgtatcactttccatcttaccatttttaaaaatgacttatttatttttattttacacatgtgggtgctttgtctacgtgtatttatggattgtataccatgtgcatgcttggtgcagttgggggcaaaaagaggccattggatccccaggaactggagttacagatggctgtgagcccccagatactgggaacggaacctgtgtcctctgaaagctaagcaagggctaaaggaagtacgtcacaggggggctttgagagcatttggtgttccccctccctgtttcctgcttatgaggtgtgagcacctgaactctagccactgtgcttggtgtttgctgccatgcttcccactgtgatggtgacagactcctctctgtggaaccataagctcagaataaaccttccttccttccgtacgtcgcctcggtctctgtgttgtatcacagagacaggaacataagtaagctgctgattaaccaagtctttgaggtccaattcagaagatctggtgtgagcttttcaccacctttgtccacagccttcccttaacacgaggaaacccaatcttaggagacgttctgttgagacagagcgactatgccctgccacagctgttttcataaccaagtcccactctgactctttcaagtattgcctgtatcacactcacaaaagaaaacaaatctcttttgacacaacgttctgaccaagttcaatctggttattcatgttattccaacatttttttggtagaaaagataaacatggtctctgaaaacagaaaagaaaagaaaaaaaaacataatcaaaaaagcaccacggacctttacaaggcctggccctgctgcccagatgtgctcttccttcagcttggtttaattacaggccccagatgtcagcaacccatcagcttcaggtgtgattcagatctccccacagtatcaggagcctgccaaaatccccaagcttccagggtgacttgagaaatgcactcctatagagaaagcccctgttacgggcaggaagctcatttgcaggaggggcagaaccgtgatctcccttctggctctctctcatttaggagcacagcgaagataacttggttcaagttcagcccatgtctgagatcagtgacgatactctcaagggaggtgtgatacttctgaagtctagctcctggtcacacttggctaaatctcaaacaatggtcatggtatgcagaggttgctgagagcactaatgagcctgtactcttgaacagtagaaagagcatagcacacttgtttattctttttcttttttcccgtggtgtgtcaaagatgaactttttatagtgcctctgggtccacagttagacaaaaatgcaattagtaaacagagtttgctggctagggtagccaaaagtagaaagataattcccaacatgatccagtcatagatgaaaaccaaactcctgtgagaaaagggagggaattttctttgaataaataagacctttgctcaagacctcaaggtgggagtgtttaggccatgtgacatcagcaagaaaaagcttgaacagttccccagacccatgatctggaataccaatctccaggccacaaagggaagattagccgaaacccagaaggtaccaatacaaaaccagaagacacagacaaatcattctcacaattctgggaattaccaaatgtctttgctccaccacattcccaaggtttatattctgtgtaatgtagtatgtgagttgtttattagcacgatggcaaaagcaggtctagctgggggcagcgggaacatgagatagctcatcatgttgcagctatagtcaggaagccaagaggtgaatgccaacactccactcaccttttctttttattccatgtaggaccccagcccaggggatggtgacactcatattcagagtgtcagttaaacttctctaaaagcaccttcacagatatgcccatcaataaagatgaactatcccaatgccaaaactctgaagaccaatagtgacagttgtacaacactgagcctgtacatagaaccatgcaattatgcacataatattggctaacatgggtggtgggaaaggatctgggctggggtagatgataagcaggacatagaatgaatatccttatcatcctgttgagggagcttctgaccagtaggtattgtgacctgctgggactattggaacatatatagtataagatcgagctacaaaaatcacggcttttctcagctattcctgctcaggggcagcaaggacccctgagctagttactttcatgttgctaggataaaatatttcacaagaagcaacacgaggaagagttcattttgcatcgaagtttaagaatgcagtccatcacagtggggaagtcacaaggcagaactgttaggcagacatccctattgtatctacaatcaggaagtagagagaccagtggtcatctttagatccttttcccctttcattcaagtccagcaccctagcccacagggtgatgtcttcttgcctcatctagtccatccataaagtggctcacagatatgcctagaggcttatctccaaggtggttataaaccctatcaagttgagaatcactgttaagcatcaaaactccattctttgtcaccttgacacacacacacacacacacacacacacacatcatgtttaagccatggctttccacccttttccccaagactcatggctagcccataatgtaaaatgtattcaatcaaacttcaaatatcatgcagcattcatgttgtttaaagattcagagtcaagtctcttctgagactcgagacaatgtcctcattgtgagctcctataaaatgaaaagcaagccgcatagctctaacaaacagtgacccagcataactgcaaaatccacaagggtacagtgaggacatagcgcaaaaagaactggccagcgccatattgaaattttatcaggatcatatcaaatcctgcagctctttgcagagcatttggggctcttgatggaattgtatgggttccaaaaagcattgggtatccctgctactccagctctgctacctgaagcttgcatggcctctctcctgagctaactccatctctaactgcagctttccttggggaccatctcatggttccagcatccccatgtctcttggggtcttaaggtctccttgcaaactgaggtttacctcagtttcatgcaatgatctctcaaggcctcctggctggggctctggatctgccacatattgcccaacctcagcagctgtctggaacaggcctcaagtaaccctcactcctgcatccttcacgcctgcaaggtcagtattgcatgaacagcactagcagctgtttctgccaactctgaatgcagcctgtcatccttggatcacagctgcactagctgtaccagaaagttactttaaacaacaagctacctgagcagcattctaggtagaggccctctcctgccaagtgaacttgcatgtcagagccttcagctgatgaggtcctttgctattattgtctcagtggagaacatgagttgacagcacagcactaacctcttcagtggctacaggagctttgtctgcatgctcctcgaccacaaacagtacccatgcaaaagcctgaacactgtcctgccttgaattccctccaccaaacaaattagaccattaattttttttattcagcctaacaaagttctcaggaaatggacagaatgaagttagagcctgagtggcctctgcttttctaggaagtcctggttcccctctgagccctcataaatcaggttcccgctgtctacatttccctctgtcttcttgtcttccacattcccactgagctctgttcacagaatcctagggcttcactagactagctataaacagtcccatattctttccacaaaccagtcccaaaaggctatgaaccacgtgattgggtttttgagaacaacccagtcccactgctgactttctgtacttcttacattctcagagctgggacaaaggacctggtaaaaggaacttaagaaaggaaagatttctctagcctcacagtttgagttcagtccgttatggtaccgaagtgatgcacctggaccctgaggtcacattgcatgtacagtcaggtaccagagacccacgaatgctgatactcagctcttctcctcctttttatttggtccccatggaatggagcatccacagttacctcgggtgtttcaattgaaccaatctacacccccttcacaggcatgcccagagaactgtcatctactaagtgatcccagatgatcccggcaagatggcagccaacatcaactattacatcctggcatcagagtttttataatccatgccaaccagaattgacaaatcaagagaaaacagtaatgcagtttacaatgaataaatatttggaaaatagagacaagaggctgaagcaaaactttgatgaacccgtacaatgcctcaaatactatggtgagttcctaagtaatatcctagtacccggtttgcttcttgtgcaattctttgatattctaacacaatgtagaacagtgtaggcatgcatccgtggctaccatgtcctatacattcattgaacagagctctgtgtaaattgccctgcctcacccaaaataagcgatcctatttggcgctaaagaaaatgagctgtcaagcacaaaaatacaaggaggaaccttaaatgtgtactgctaagtcaaagaaatcaatcagaaaggctccttactagattatcccaactaaatgacacccccaagaaggaaaggcatggggatgtgtaggatcagcacttttcacattttatcaggagggatgaactggcaattacagagaatttttaagaaattaaaacaactttgtatgagactatagtggcagttctatttcgctatccattggccaaaatacatagaatgccgccaaaaaatggcacttaaggttaacgctaggtttcaagggatggtgatgtgtccaggcagggtggccgattacagtgtgctgccctaacgtgggtggggctgactgaagagaagagtgtgtgaggggagtcagcaaatgtgtatagtatctatgccccttcctgttaaatccacagtggatttaaaactattctaaaggctgttctccaaacagctcttcagaagaaagatacaaaggaacccacacacaccacaacttgctaacgtgatctcatttggaaatagtgtctttgcaaatgtatccagacttcaaagaaagccatagtgggttcagttggcccagtaccataattagtgtcctcatagggagggatctggacacagaggaactcacatcacacagaggaacagggggtgtgcgggtgtacaaagatgacatgaaatgaacagtgcagcaataagcccaagcaagcccagcactgtcagcaaacacacatgaggcaggatgcagtaggaagaattgtctagagctcccaggaagagtagaaccctgataagattacgatttgggatatctgggctccaaaacatgagaaaaaataacttctattgatatgtttcaagacttccagactttggtaatgtgccatggaaacccacagaaactactggacgtgatgaaccaggtggcttcagcatactgtttatctctattagaaatttcttattctctacttcaaaaacacaaggctgaaagctcctcccaccttgttctccctctcttgctgccaactccctgaggagacagacagatccctgtctgttctgtttctccctcctctctcttttctctcatctctctttttctctctctcccttctctcccttcctccactcccttcccaataaaacttcctgtccaggaaaaaaaaaaaaactacaatgctatctgccaccacccaaacacaacctagagtcccattcttccattctctatgcatgctgccatttactctctgaattcttttacaccttttattgacctgtaataaccaccacattcaaccttctaccttctgaatgaacacacccacctcacccctgggaagccttccagaatccccagccagcaaaagcagcattgtctcccagctgtacccactgtgtgcttgagttgggtgctacctcttattcatttttaaattctccatacctaagtgcttaacacacacctagggaagcatctttaccttacctggttatctcagtagaaaataactcccccacccaaaagaagccaaagaaacatcagaaagcaatcccgcaggcttgtacagcctcatttgcataattcatcaacgtttctcaatcttcaaaactgttttgtaaacaatatcttcagcatccatttacaagtaatcaaatcaccatggtgatataaactaatgtgcttatgtttacttaaagtatgggctcgggtgcctgcctacacattcaaaaccatgtgacagtctcatggacatagacaaacaggtaggaaacaagaagtgtgtctggcagttttcgaatgagttcatctattttaacatggtttgttcacttgaaaaggaagtctggaagttaatatttcctttccttatattttggagaatttcatatgtatgtattgcatttacgtaacttcctcccttccctctccccactcttcttttgtattcccaaccccttctcaaattcacactcttcgtctttagaagcacaaacctactgcgtctatttagtcttgttccatttagtaatgtattccgggctgaccacagggatgggataagctactaggaagcttgtccctgatgaaaaccgattctctctctcagcagtcactgttacctgcagttctgcatctggtgggggccctcgggaagttcccccatacatgttggggtgtcagttggggttgtcattgtgtaggtcttgttcaagagaccatactgctgaaatgaaatttcataggtgtggcttccctgttgtgtctagaagacactacctcacagcaaccccccgggccctctggctcttatggcctgttggcccctctcctgtgatttttgcctgagtcttaggcataggggttacatggtagatacagcatttgggtataggcaccttgtgtcacttattttctgcactctgaccagttatatagctctgtaatagttcccatctgctgaaaaataataataataataataataataataataataataataataataagcctcacagatgaggtgagagctattgctgaagacaccacacactttggtcgtggtttggaggaactcagctggagctaactggacagtcctccttactgaggacagggtcttacatatcagaaggtactataatctcagcactcaggaggctggtgacgtttgaggcttgtctgattttatttcggttacatacatggtggttaaattgatgggagataagaaatgcaagaatatccaagctgccaaaactttatcaaagtgattacaagtttactctcccaacaacaacagaggaaaacctgaaagtcgtgagactggtgagctttacctgattctaaaatgatttgggtcttccctggtccagggaaagttttccaactgataaccccttaatatgtataaccaggttgtaaaaacaagaatgaaagattcccactattaaggttttatatgaaaccttgtccttgggactaagttcaaataacccatcaactaaaggcagaaaatactctaataccaactggttggttactgagcatctttgcttgtccattgttgtctttagtgtttgaaggcgatgaatcaatctacacaaactctgagggactctctgaagcctaaatgcatctgtcatcacagcaaaggctggcaaaactacaaaaagtcctgtggaggcgctcatagtctcaacaggttgcacatgaaggtaaggtgcctgtacatgtcaaacaggagagctgcccagggtactatttttaggaatgagatggtgaacattaaagtaattatcgcactgaaacattactggcaagcactgtaccagtgagcaacagtcctggctgtgaaatgttcccacaataaaaactttgatgtagagaaataagctcttaattgtaaacattaaaagtgtgtgagcgagggggagagagagagatttggggtcagcacgaaggttcatcagttatggatgtatatagagatgtatatttggaaagccttctgggcagttttcctcttttctttcagtctgcagtagatgaaaagattcattaagtgagaaattatcaacatgtatctctaaagcctaattgcattgtggtaaaaaatccaagacacctgtgactatggaaaataacaacggggaatttcatttcagtaaacagtgtctgtctcaaactgctgtataaatgacgtgcgtcaaaatctttgaaaagaaaactctgcaatcctcggtccagatgctcagttaccagacaatctgtaagactttcttcccatccaacgaggaggccatttgtctagtgtggccgtggattattcccttagggatcctttcctgatgccctatattcgaggcccacgtgtctcactaagtggagcctgcctatcagtccattcccaaacaaattcaataacaaaacaggtctggaagtctgagaaaatgaggaaaggggatggggtaaggggacttctctgatggtagcctgttttatccatggaaatctttaaaataatacccttggccatcaccaagtcctgctacattttagaattctaatgcaggccaaatgaggagtttcattgttggtcactgcaacaaaatgtctcaaggatatatattataatggttgcattggatagcaataagcattaaatcaagcctgcaaaacccaatataataatagcactctccaggcattagtggcacacgcctttaatcccagcactcgggaggcagaggcagatggatatctgtgagttcgaggccagcctggtctccagagggagtgccaggataggctccaaaactacacagagaaaccctgtctcgaaaaactaaaggaagaaagaaagaaagaaagaaagaaagaaagaaagaaagaaagaaagaaagaaagaataaaaaataatatcactctacagaggaagcttgacccttttttgtggatttaagattcagcaaacttagattttatggttctcatatttatattaagcagctccttttatctaatatattgacagcacctcatgaaaatgactgactgaaccacaatgtaccaggtgaaccctgcgtcctccccacattgctcgctttggagtatgtggtgaaccccgcgtcctcccctcattgctcgctttggagtatgtggtgaaccccgcgtcctcccctcattgctcgctttggagtatgtggtgaaccccgcgtcctcccctcattgctcgctttggagtatgtggtgaaccccgcgtcctcccctcattgctcgctttggagtatgtggtgaaccccgcgtcctccccacattgctcgctttggagtatgtggtgaaccccgcgtcctccccacattgctcgctttggagtatgtggtgaacctcgcgtcctcccctcattgctcgctttggagtatgtggtgaggagaagctcatgtggaaggcctgtgtgtgaaggccagaagccagctacactctcattcctcaggtgccatccacctagtctttttgaaacaaaatctctcacttggcctggagttttccccttaggcttggctgtctggtgaatgccagggacacaacgccatcatcatgtctcagtcccctcagccacaggatttcaagcacccaacaccatgctggcttttctgtgtgtgttgaggagataaatgcaggctttcctgcttgccgggaagtgccttacacactgggctatctccccagacagaacgctcttttcttcttaacttctaccctcgtctctgtgcaatgccattattgtggattcttcatagtttaaccatctgcccaggctttggaaacccaaacgtatctgacttccttcaccaaagcagcagcacctatacttaataataaatggtcttccctttaaaaaaaaaatccttaaaaactttagtttataaacaaatatttcagaataaaaccttattaatatagtgactactataatggatactaagttctaaattcacttataggttacttcttttctatcataattcctcattaaatctttggggattttgcatcatgcacctcaatcccatttatttcccgggcctttcatgtccatcctccattcttgtaacatccccaaccaaaagaaaattaaaatagagatttgaaaagaaaaaaatctaccttgctgacttctctgggcagcgggctgctcctctgtccacctcaggctcctaggcacacaccattcctctcctcagtctttccactctccatcatatacccattcaccatagtggcatcggaagtcgcagtgtgtcccacggtgcacccttttccccaaacagctttacttgtgaatgtccattgcaacgagtcattagtctagttcaaggtctctagcttcgctataccatcaatcctggaccctcatagagactctcaggtatctgctatggccctaaatctctgggatcctgcagctatggatctacaggactggcccttcatgagctccagcagctcatagatggggagatgttggggttaggatcagctcaaggccctggatctgggcctgggtggtggctgagttggtcagtctgccagctctcccattctcacaccctgggagcatctcttccaggtacccaggcgaggggtggggctaggctacttcttatagcaaagtacaaaccaagcatggactttgcatataaatattcctgcctgaaggcatgtcggagtccagcagaacttgaggacaacttagcttcacattcaactcctctcagaggaatggatgggggaggggggcggagaggattcggggagcgggaggatggaagggagagggaactgggattagtatgtaaaataagattgttctaacttaaatacaaatcaatttaaaaaaagaaatggagaaccacataggggcagtttctatgagtctcatcagaaacaagtgcacaggatattggatatcagccactttacatttgcaggaacccaggcctccacaacgtaaaaaggtcttcctgtgaagaactcccttgtctgtctttcttggtcaaaggtcttctgctgtccgagaggcttccctttagagcacactgtcctctaaagtactatgagatgtgggagacttaaatcacattgttctttcaggtaaaaccttttgtgtgggacagtgacatctatagcatctgcctttgcagaagtcccataaataatacaagcttccataacaagtaacccagagacctaagtgacttcacacatgtctctggactgtagcagcaggcacacttaaaacacactatttctatataaattctactagtcctacatctcccatgcggccactgcagagacgccagggagtggagctccagctgtctgtctaggaagaagaggaaattccccttctacaacttcacgaatgaatcaggggacaaatgttcagaaagtaagagttggctcaatggacagttacaatcaaggctgcttttagaggagaccttttctttctttctccctatcttggcagcaaataattactgagtcattgttccccctaaatgtgattcacccactgtctctttgtccttggttttatctaagaacagagccctgtgcaatgggcctgcccactcacccattcacaggcatgttctgttccaaagagctgttcctcaggaacagatagttaaagctcccagatttgtccacactggcgcagatcactggagtagcttaacgtgtaaattatcctaaccagtatttatgcgtaaggctgtacaggaatagacccttaccatgctcttcagatgctgaaattgcacattgtgggcacaccccacccctgtaaatctgaactgtatttccaggtttcaaaggacacaaatgacagtggactggtttccctgaagactgcacagcagggcaaaaccccagcccactgtcacgattgtgtcaccatagctggggtttaacagaaaacctgacctttcacgtctgtttctacacagtccccacattctctttacatggtgtgaaaacttaacactttcacagcactaaaaatgtgccagggggccaatgagatggctaagcaggtaaaggcacctgccacccagcctgatgatctgagtttgaactctcaacctacatactggaaggggagaacaaactccccaagtggtcttccaacttgcataaacaaacacatacaataaataaattcttttttagtagcaagaatagcagacaaagagattcgtgagttaaaaggagtcaagctattctactaagagttaaaaatacacaggaatctaatcatttgcatcttgggaaccctaaacattctgaactcagatgactcagaaacattactaagtaccagaaataaataagatggtggcatgcacattaactcaacttttgttttgcagcatacaatactcacctaattctgagagataaaagtaccaagatataaactgacttcctaaggcctcatctaagtaaagggaacaaaaagacatttgtttggtttaactctggttggtttaattttggaatgttcgtgggtttttttccctttctgccatgtctctcataataccactttctaagatgcagtaattggacatctggtagaccagcatctgacctccccattagcccctgtcctcaggccatatctaccaaggatgcaagtgtcagaaggggtaactttcccagaaaatcttctgctattcaaagctaaaatttcagcatctacatttcctatgacaataacacacacacacacacacagagagagagagagagagagagagagagagagagaatttatatgtagtaagagagtggaaagagtatattaagtatattaaggattatccaaaggattgtttttgatacctcaatagaagttatttagacatgcccaatagttctctctctcctaagggttgaagacacaagacatgagcagtaagatgacagattcatcacctcagagtctcttaactcttcctataattcaaatcatatgttacctaagagtagttatctccctctctgctgaacagtctaactatgccagtgaagtgcaggattaaccatttctattttaccaaacgtgtcacaggcaagaagctccaaatgacctcattggcttatagctgaactggatggaagatacaggaaagccatttacatcattgtaaatgtatgtgtgatgcaacctgtccttaacaaaaactaacataaaatttcagtccctcaagcaaagttagttctagagatctgctctatatcaccatgcttacagttaataatactgtattgtacactggaaaagtgttaagagggtaggtcttatgttaaacatccttaccacagttttgaaagatgcagcattggatgaaatcaagacatggggatgtcaaaacctcttcaggacatcaatgcatggaaatctgagaggtctttaatactgtgcgcttaggggacccataatgacagcctgcctggctggaaaccttcctctttatgtaatgatgaaaggttattgttaaagacactggaattagatactaacagagtctcttaacatcctttgtcaaagtagagagcctctaaggggtgagtgccaatcaatggcttttcatgtctgtagacacaaaacaaaaggagtaggtttaaattacagcatagagcttccataacaccctaggaaagagccctcttaaggggaaagcacttagcaagaatcctgataagtaaggaaaagtggtcctgcttagagatcctttaaaaacatctgtccctggtatctctggccatccatagggcagggtggaacatttgcccaaggtgtcaccagccatgaattcataaagtgtatatgctccaaatatttctgaaagcattttctataaagctggggctgaaattcaatagaaagcatccctatatctattttttgctagcatttttttattagttcaaattaggaacaagcttgcttcccatgccaatcccttctccctctgtcttctcccaccccccagccctatatctatttttaatggtatttgaaagtaattaactagttccctggaaagcattctcttaaaggcaaattttgaagtaggaggtgtccacatgaccgtggactgtgcacagggtgactcaagctcccctctactggcgtgctttggccagctcacacggggccacagctttgctaaactacacttttcaatgtcttcattaggctggttggcctgtgattggatactacggtgttgatctttagaccaaagaagttggcagacactgacactcaggaaggagcttgttggtttccagtaagctaatagtaattaaaagtttaccaaattatgtttcccattgtggttagaaagagccatctgactagtgggaattctgacatttggtaaatgatataatctgtagttcctctgaatcctaatccttgaaattaatgtaggaagtcctgctttctgtcgtaggtgttgattggagtgatgactgttcctcacacacgtgttgatgttgatcatatccagggtaacatgatactaacaagcatgtgtgtggtggtatcagcagaatccttcttggtttttaattgggggactggagaaatgtctcagaggctaagagcactggcttctcttccagaggacctaggtttggttcccagcacctacatggcagctaaaaaccatctgtaactacagttctaagggatccaatgccctcttctggcctcctcagacattgtacatatgtggcacacaaacatacatgtaggcaaaatatcccatttatttgtacacattaaatacaaataaatctcaaaattatacaataaaatggcaattggtttctaaaagctattattgtacctttgaaagcaattcttagtttctgcaagtcaaaacaaaataaagaacactgagtgaggctttgcagatgccactgtcccctgtcacctcttcctgcagccatggtcaatcccaccgtgttcttcgacatcacggccaatggcgagccctggggccacgtctccttcgagctatttgcagacaaagttccaaagccagcagaaaactttcgagctctgagcactggagagaaaggatttggatataagggttcctcctttcacagaattattccaggattcatgtgccagggtgatgacttcacacgccataatggcactggccgcaggtccatctatggagagaaatttgaggatgagaacttcatcctgaagcatacaggtcctggcatcttgtccatggcaaatgctggaccaaacacaaatggttcccagttttttatctacacaacaaaaaaaaagaacactgagtgaaatagaaattgtttgccatttggattatatgagatctctatccttcattaataaatttgctgcctgggtaatttaagttaatgttactaaatttataaattattaactatatcctgaaggctttgatccatatgtagctaaaccctttgtagggatattaaaacataggttccttggctaggcctggagcctcagattcaatggacccaaggtgccattcagaggcttattgctgttaatgctgccagactcagagccacactgtaagacccacaattccatctcatcacccactctgcaacgtcacattttctttgtgtcatccagtacatgttatctgtccttacttttgggacattcactctcaaaaacaccttggtccctgtgtttctattggtgcttaacaaacaaaccaaactttggtagcttaaaaagcattattttatgtttaaggggtctacggttagcaagtgcatgattggtgctgatttgggaccacatcagtgatctagacctggggtaactctcgcagctgggatcaattggctgatatcatatcatctcacatatctggtggctggccagctgtcagccacagggacaagggtgactaggctccaggatgatggtcatccagttggctaggccaggctgtctcatacgagctgataagattctaggaagtgtggcagaggcactcgtggtctcccgagaccaagacttagaatttccatgacttctcttgctctgcattctgttggcaaatgagccaggaggccagctcaaactccaaggaaggtccaaggaagaggcgttaaatcttatctcctaatggaagatgctggttgccgagtcactttgagaaggacatgactgcaaggaagggtggctgtctcacttgttactcacttgttattctaagaaatgcctggacaaatcaaaataccaggataaaagcagcttgagcctccagctggtgttccctttctcattgccacaacaatctgtcggaatcaacgcaaggaaagaggggtttgcttgggctcatggtttgagggtctcatccctcatgctgtgaggatgtctcagtagagggaagctgtggtggcaggagcctgttgctggtcacatgcgtccacagtcaggaagcagagagagaggaaggccagtcctcagatggctttcttgttactaggacatggaatggtgccacccacgttcagagtgggccttctctcttcatttaaccctaaaggaaacacctgtattgtgccaaccagaggtgtgcctcctgggctgatttttaactcccaccaactaagaccagctatcaggcagctgtttaaacatgtctacatcttcccatacctaataatgagaaaagcacgccccagaaagccgctacccatagtcttctgacttagtcggggttttgattgctgtgaagagacaccatatccatggcaactcttataaagaaagcatttaattggggtttcagaggttgcgttcattatcatcatgacgggtatcatgatggtgtgcaggcagacgtggtgctggagctgaggatgctacatcttgcaggcaacagaaagtcaactggctgtcacactaggggaaacttaagcacaagagacctcaaagctggcccccacggtgacatacatcctccaacaaggccacccctcctaatagaaccactccctttagcggccattttctttcaaaccatcacacatgggtactgggaccaaaactcttccaagttgctgctggatgttgttcactcctggatgtaaacagtaaaccattctgtttggccttggagaaagaagcccacataatatgtttataatgcatttacaaaacatttttcctggatccctataccttttcttccactttgcctttaagtgtgtttgatgtctagtagcatttcccaaggacgctgctctcaacacattttagtgaatcgttttcaaagaagactttgatcttatttcccagatgagatctccaaacaaccatctaactctaattttagtattaggacgccattctttgttccttcatagaaataacagacacaattaccacaggaagagtccaggatatagagagacttggttacccacatcatctactgagtggggaattctttcctctttattcttttactattgacattaccctttcaaagtgctttaaaactatagccgcccactgggatttattggaacatgcacaaagccagatcttgtttctagtactttctgctcttctaggaaaacaattgctaaagttgggctccatttggtgatacattgaaaacaattcctaaatgaacacatgacttgtatgatgaagtcctaggtctacaggagcaaatacatctaatcatcccttcattttcctcccttcattcttccatccctgtacacactatttattgctggagacagaacaggaccttgcatatgataggaatgtgctgtgttctctttaacattaaatgtaaagttgacaaaacctagaatcacctggtggtgtggggggggggacgactcaactgagtattgagtctatcagactggcctctaagcatccctgtgaggggttgtcttgattgttagctaatgtagggggtggcagcccatagtgagtggcaccattcttcaagcattttatgtgtataagtgttttgcctgtgtgtatatctttgtaccatgtacatgcctcttgcggacagagatcagaagacagcatggaatggtccctagaactggaatcaggaatgatcataagcttcattgagagtgctgggaattgaacccagttcttctgcaagatcaacaagtgcccttgaccacggagccacctcccaagccccggctttcacatttgcaatccctctcctgacagatgggacacaccatctcaacctttttcataaactttggtgacagaaacaagactggagatgagcaaaggctctgacgagtgcttgattaattggggatttcaaattcagaaaattcctaaactaaagaaagagatgatttgtggggacgatcttctatctgggccatactcttcttcagtcaacacttcagttttgaatttatggggggaagaaaaagctgcctacatttgtagaactggattaagataagagaaaatagctgttgaatgtaacatttgtaaagaaaatatggtaagttcacagatgtggaaatccttacccatgacaagaaagtcgattacacaccaatgagggcataataaataaatacgaccttcaaagagacagagaactccaagtgtgaagcaccacacggtttatttctcctcatgttccacagccttgtgaactaaataacttcttcatagacagtgctgcacacttgggaaacgaggctgcagcagccatgaaagttaccacagcgagactgtggctcagcctaccagccggtgtaaaggtgggaaaagattcctactccacatcacatcgtgggataatagacctcacagatgagggactgtgcccgtcacagcttgtcttgtctcatttggttactcaccctgtgtccagaatgtgctttaagcagatagacaagcattttctaaacttgtgctgtcctggtgcagaaggtccgtgtcactgagaggcctgcacggggctctccacagatggctttgcgcagactaaagtagtgagcagggtattggagacagaggtgcagagaagcagccaggacgaagcaactatgcagctgcagcggaagagattcgggcccttttataccaagaacgaaaagactgttgaggaacacgcatcttttgattcttttgatgcaacgggacattgccctggctgagttccttcatctcccttgacccctgttttctcacccataaaataacagcagggccatgaaaagaattaaataaaagtgtacggaacactcagttcagactcggaactatcacgagtggttaaatgcttagcgtggttggtgaaacacaaacacgaggatctgtgaggcgtgatctgtgggagcagctgaggaaactgtgaaacaaaggcgagagggatgactaagatgaagagagcagggtgtagagagactacagggagataacagtggggctttctttgcctgggcctggggcagagagtaaaagggagaagtgggacccaggctgccctgcaggagggcatgggtgacctgatgggctctcgctgcactgcaatgctgaaaggagccctctaagaacctctacctgtggtttctccaccctgattggagccaaatgtacaagagtgtcagatatgacacagcaaccatacagcccacgtggtctgtgctcagagctccctgtgaaaagaaggacggacagacctgacagagaagggcattaaaaaaatggaagtcagataaaaacaaatactttgatgatggctatatttgatgtatgttattagaatgacaaccaattgaagtctagactgtcagtcattaaactgcatttagttagcgttagtaaatgcagattaatgcataaatataatcaataaacattactaagagatagcaccataggaagccacctgtgttcacctagtctggttctttgttagcagctcacatgattagcaagtgactaattttccctaaaagaaaagtagatacttcaacccttgccatttttttttaccaaatttatttcaaagtttatgaactaatctttggcattctgaacctgagacaaggaagcatgaagacattgctcaggaaatatcagccctgaggaataagctcaaccccaccacatgcaaagtctctcaagcatgtttcattctgtctgtttagaaccccgagttcctagtgtatacattacccttcagtgatgtatggattcaccttcagctgttgaaaatcaatacactgagtgcttggccatgaacaggacatttgtcctcccgcagaaggctcggagaacatcagggaagaggatgcagaaagaatttaagtgccagaagacaggaaaaaggacttttgggtactgtctcagagcatcacacagcctgtacagtcctggcctcatggtggctgggtcgatggatgctcaatcatggatcaaagttctatcccttcctgcctaactattggctactggtggattctgggtggagagaagacattgtcttcagttgtgtacccactaagagcccaccagactcctgtgggcagttccaaatccacagtcccacaaatgaccctggttaaactgattgaggtacaaaagcaaagaaaaaaaaaaacatgcacacacacaacaaaacgaaagccagctatgagcatgggagatttataaggaagggggttaataatcaaatgtacattatatgaaactttcaaagaacaaacaataaagtggttgttcttgtttgtgtttagcacaggctatcacatctaattagtgatgccctttgaaaggagagggcagagtgttaaggcacagggctctagataaggtccattcatactataatgtcctcagagcctggatgcagaagaagttatatagtacagactccagagaagggcattagcccctggtgaagataaaacacacaaaggcatagagaaggacccaacgcaagctctaactaatcccatgtgagctgaacctcaccagggtagatgaaagcaggcagcctgtgaaactgccttcatattgcatagctagcacaggtctgtgccacatgggagaggaatatccctacaggtaggtcaaagcatttatacagtcacctcagaaagctttcggtctcgacctagacatacatagaaccttcccagggtgggagtgtgaggggtggtggctacgaactgaacctttgttatctttctcagagtatttccaggctagtgaacattatggtgagttcaggtcctttgccagtctttctgcaagtctgattaagcccatctggttctgattaattgacaattaacctggcaagcactgtcttagaagaaccacatttagggtccaagcatctcctagctattatcttgcttaaacgagatcacaggacagaatacaaaggcaggcaaatgttcaatggaggatggtataacgggggccgggagtgtcaagaggctccatggaggaaagggaacgtgggtttggctggaaagatgcccatttattcctgcttagcctcccccatgtctaacagtgtcttgcaggtgataaatgtgtgaccagaaggtgctgactgaaaagacagcagtaaggactaatatgcttctcaataaatcaccaacagcaatgtcctggagaattcagttagtggaagcatttgtcaaatatcattccaaggttcctaggccccttgtgtctcaaggaacacatatgctttcctaggcttctagcaaacagctgaagaggcaggaaccagtgagcactaaacttcccagccattacccaactgaagggaagaaaaaatcctccctgtgcatctggcagggcaaaaagaattacaccaaggaatctgtagtttcatgaaattcagcaggctcattggtgggtggtattccgttcctctcacagctctcctctatttctggtatctagtctctgcctgcggacacctcagatgtgaagaaaagggagagaaagagcagacgccaggataaacacgagtccacagggtacttggtggctgcgtgcccacttgctcagtatgtaaaaatcaaaatctttgctatttcactggtgttcagttttgtaaagagtgagggggagacatggcctctgacgtctctatggttccctatctcctttccttaaaattggttctctctgtctgtctgtttttgtctctgtctctgtctctctccctctctcctccctctctctctccttctccctctctctcgaggtctcatcacctcccatgtgctgagactagaggcccatatcaccacttccattttatgcaacactgggcatcaacccagggcttccagcacacatcaacccaaggtttcctgcatgctacacaagcctgctactagctgagctacagtctctgtccagatctgcctctttcaaatcatcagtggctctggttaaaaatgaccattgcagagcttctcctaccttccatagatggctcctcagcctggcaccctccccttatcctctggcattgcccatactgccaactccccccatacccagtaagactcctcatcatcggcattagaagaccacacaggggaccattacttagaaactcatgactctcggaactagcccttctccagattatacccctgagacccaatagttactggacaggtcaccatgaaagttctataggcatctatccagctcaaagacacgaacggtcatttcatatggatcctttttcctgcttctagcaagcatgacatttgtccatctaccttaggtcttacccttgctttctactcccagttcatcaccaaatcctgctggttccaacagttcagtgtctcccaaggtcatctacttctctccatatttaatgccaccaccctcacttgggctgcctccaaatggcaccttctttactgccgggttctgagcagcctccaatgtgtttccagtcctgtccctctccaatcctcctctgtgctgcagacaatgtggtcttcatagaatctgtaaaatcaagaggcttgggagttagttccgtggtagagtgcttgcctaccaagaacagggtcctgggtttgatccctgactctggaaaaagtgggggggagacaaaattatgaatattataggataatttcagtccagccctgggtcagaatttctaaaaattcactaaaacttagatgtgatcatcacacacacacacacacacacacacacacacacacacacatacacacacacacgcacacacacacacacaccacatggcataagcttctttctatgccctctgaggaaaagcactaaatcctttgcaaagctctgaaggccctacatggccacttcctgcaccctctccagtcttacctcatgtcttgctttacattttctttgcatttcaagtttgtttttctttaaggatctctaatatgctgtttccttcatccacgtagcatttctatacactgtcccggccggttgttttcccacccaccataacatcatctccatcatgaaagttagctctctttgcacggcacacctctattcaaacctccctccctcggagcttaaactggactgcagcttctcaagacttcagctacacaagtcagaccactcggcttccagatctcagaccgcttataactccataccttatcagggattacttgatcaataagccctctatcaaaattaattgtccttgggcaggaatatattttactcagccaatatttccaaagcctggtgaaatgtctatgcattatttaaaatgtatatataattgatgaattctccactcctcctccaaacacacaaaatatgcctgttcaaccctattttcttagcatccttcctaactctttaaatccctccctacctctacaccactggctgcctagcgtaaccggttgcagaagtcctccaaggccttcatgcttctaagctcttagtaccctcatccagactttatgttttaagaatcataggctctcgaaaataaaattatgaacacagctttgaatatccctaaaaatggtggcgattcacacccatatctgtgtgccagcatctccttttgctctctcctcttccaagtggaagcacatatttaaagattatgacatccacataacttgctgggatatatgggcagaggcagcagagctggaagctaagggatctgataacttaataggctgacagtccttgtggcttgtcacccagtttgacaagacctcacttctacaatgtgatcaataattaagctttgaggaaggctggctttctctgggaaatattctctgtcacttttgtgaccctagtattgcctggatggcttctgaataacaaggttgcttagtttatgttccagtcttttctgttaaattgaaaacctcgttggaacagagatggtaacttacccatcagtcctttgcccagtctttatagcacagcgatggtacccaaccatgggaatgctgaacagaaaagggggactagaaagatttcagagatgcacagtccaagtatcctgcatggttactgtgtaaatctccctctatcatcacttttatatttgtagattgatttggaagaatgaaaaccattgcattatctcccccaagcccttttacctacagataagccttcaaagaacaccaggactaaacaaagtgtggtttggttcaaatgataaatatccccaagtgacaaatctggctgctttgtgaaactgagtccccagtgtccaacaggctaatatacttttggccaccagaacattttctgctagctgctgatgcttccagactcagctgtttctcataagccaaaggagagagattccagaaggtgaagatgttacaaatgcattgaaaattgtcaacatttttgtttcaagtcgtgattgaaatgtgtagagcctcatagttttcagctgccgagaatgctcttgatgtggttgggggtgggggggggagtggcgaaagggaaagctaaggctgccagaatgaaacttccattctcagatggacttgacagcaaaatgagcacaggccaaagtccaccatgacccaaaagtgttccgaggctcactgggaggccagtgaacatcacgggactggtgaccagtggcatggtcattcattccagcacttgccatctgagaggggacagctgccagcaaagtccaacatcagcaactgcctgccctctgccttctcttgtgactgtcactcattgccaccaacctagcagacaaaggtgggttcttgtcctttgtgaatagaaatcccagtcggctgtgaaatgtaggtgatgtcatggttaatctctcaaggatgttgggagggataaaggagaaatggggtgcatgccatggatcaaaacatttgagaactgagcctcggctggaacaaaaacctcctcccataggagcactgaagaactctgtgggaaacttgagaaagcaaccacttccaaccctcagatctaaacatgtaggtaaaagcagattccaggaagatgtagttggtgaccctacagtgtggcactttatttaaaagggagatctcttaagagttcccttccctgcatagtgccagaagaggactgtcctaaatactggaaggcaggagaaagtaacaaacactctgaaggtcattcaaaggtgtagggcagggtgaacttcacaagtgtcatcactgatctgctgactcagctcactgacatgggactctccacctggctcagctccagttctcatcaggaagcttccttaaatgactgggctagtctgtccttgaggggtccagtttaaccacatggattccagttggttttgccctatgcagtctatgcctggctttccctcctgacagctaacactgcagaccaaccaggacttcagaacccagcagctattccaacacagcttctcaccgaattccttactgggcctctaattgggtatgttcatctaacggaagtactaagtccctcatggtggttttgcttctctgagcaaacacaatttatttggggaatttctccctctcttgctttcccccttaactttcactgagagattagaggaggttcctagggaaatgtaccatagcatcctctgccacaaataagtagtcacatgactcaacagcacatggtcatagtgacttgcctactccaaaagctggaactggtgactatacccacattagacagatactgaatcttcaacctggagtttccattgtatcagacccaaaagagacagttcttcaatttctttaacagcaaggaggaccagagagggaagcacctggtcaccctagaaatttctagagtttctgaacccccaaatcccatgtggccagagtagaaagttcttaaactttttctctttgtggcacctttcactcaagaaatgtttaaataacctttggttttcaggattggttttcactgatttaaaaaaaactataaatttaatttaaaacctttgttgttgttgtttgagacagggtttctgtgtagccctggctgttctggaacttgctttgtagaccaggctggcctcaaactcacagagatctgcctgcctctgccttccaagtgctgggatttaagccatgagctaccatcacccagctttaaaacaacttttaattgtaaataattatactgctgcttatcaaaaacaaaagcatctctaaagagattaatgtggctatttacttttcatgaagaattaaaactgggctgaatatttgctaccatgggatataaagcatcttctacatttttcaaagttgatagaaactttgattttataatcatcaattatgaaatgccactttgcataagcacaaaatacaaagtggcaggaggacacttaaggccattcccaagattgttgcatgttaggtcttcatcccacgccaaacttgttgagtgggtttcttttatgtaaaacttgagttaacaactcaaacagtattttaaacgcaagcattccaacacagtacaatccaaagatatactaatttaatgcttacatgctgaggaatgacaacaggaaaatattaacagcctgtattttctataattaaaccattatgtttttgtaagagtggaaaactctacacgtgcaggaaaagcttagcaattcgtaacagacaacaatcttgaacctgagccaagagggttcagagggcactcagtggcaataccaggtatgatgcccccatgccacaaaaagcattgttatatatgcagcatggggctttggtggagtcctggatgcaacataggcaacgctgccagaaatatttgcatttcataacctgcttgattttaaattagcttttggttcttccacgtcctgaagcttcctattactgccaaatattttgtgactcccccataagtagttgcctgacccaacatggggtctctgatggctaatcttggttgtcaacccaacacacctgagaagaggagacctccattgagaaattgtctccatcatattggcctgtgtgcatgtcctgggcattttcttgattgctatttgacatagagaggcccagctctctgtgggcagtgccatccctagcagatagacctatgcaagctggaaggagaaagccagtaatactctgcttcagtttctgcctccagggtcctgcctcagtttccctcaatgacagactgtaacctccctatgttggttttgcttagtgtattagtatagcaatagaaacaaactagaacagattcatgacccacagattaagaaactggaggctagaggcttgggggtgggggcctgaatttgctttgttcccactcaacaaagagaaactccacagttcaaaccaaattctccttatagggttgctacacttattggataattattttttaaatgtattacatattaatttaaaagaattgcttccaaagaacttacaaattttcaacttgataaaaaaattgacttgaatccagtctttcctggatagtgttgactaacagaaaggctttccccattttcaagcctggatatttaatttctttggtgcttcctgctcaaggcttcttataaaaatagtgaatttcaagtgtttgatttgtgaaagagaaaaatcactactgggaagtatttttaatgttccttgtactgttagcaagtcacaaaatgtcagacatccatagtgtatggcaatgtccccagataccacactcggtttgtgtcacataccaaagcttgcaatgcctgtatatgtatgaccatgtggacatgtttatggagacacccatgcatatggagtcagagaacaacctcagggtcactcctcagtcgctgtccaccttgttttgtgagacaggatctctgcctgacctggaacttgcagagtagatgaggttggctggccagcaaaccccaggatctgcctgtctccacttccacagtactgggattacaagcatgtcaccatgactagctttttttaatatgggttccagagacgaaagttgcaagaaagtattttaccaactgagctctctctccaggccccaaagctgccattttaagtgtatttgtcctcacctagagaattgaagtgactcctcagatgtttctatgatgatcatcagggcttgggtcatagttcagtatgaaaacacctgtctagaatgcaggaggccatgggttcagtgcccagtgctgcaaaaataataataataataattacgtaaagtgtgtgttccacttcaatgatgtcacattgtgacccttcaaatataataaaatctgtgtcttccacacaacaggcctccccacagtcacttaagacacttttaagctattgatcccatgataagccattttaaatgcatgcttgtttttactttagattgtaataatatccattatgtcataaaagcactgctaatattatcaataataaccatgatatggaaagagtagttttgactctgtttcaccaaattaattttgtgacaaaaatttacccccaccaaagctaaaatagcatgcatcatatagattaagtacctctgatacaaaattttcaaatctgaactaccccaaaccctagcaattgtaagcactaacatgacattcctaacctgtgtgagaggccacagccaaaacacaggctcctaaagaatatagaaaaattaccttcatgccatgcgtatgcaaagcacacatgaatgtgtttagacttgggccaggatgccaggaaatctcacggtagattggaaaatgtgccaaaatttgcaaaaacaaaaatctaaaccacttcttgtcccaagcacttcagataagtgatggccaacctatatttagagcatgtagaatagatgttatataattatgtgcctgtaactatacacacatgtgttaaagttttacatatgcgtaggtatgttttagatggaggtcaacttaaattacgacaatgaaatggatgttttaataatctctaaagcttaattgagaaaaaatcacatttttacttattaatctttattatggtttagatattgcttccgtgtctcctcaaagtgacggcatcaggggatgatgtccaccataagatatgaatccaatgggcatcctcaggtgtggggggtatgcattcagtaattatgaagcattgctcatgtgtcccatgtgcccccagttagtccttagagaactggtgcaaattcctgaggatggcctcacccagcctctctgctttcacacccatgaccctatttctctctaccccatgtattcaaccgtggccaccctccaggagacaacacggcacaatagaaaccaagagggactgcccaaacctgtatcattgcatttgagcttcttttcttgtaaggttagccccctcaggtacttcactgcagtagcaaaaagctgtttgctaacacagcctcttccacaaataatgtcatgtttagatgtaatctgtgctctcaaaggctgtcaccctttccttatagcattagcttttaaagtaataaaagcatagctgtacattatgccagcttttctatcagataaataaaaattatagtgattaatttatagaattatgccagtttcagcttcattattttggtcctatattgatagcacacattttttaaagatatgagaataaaaatcatttaaaaattacagtattcacaagggaagaaagtgttcagccaagaaataaatagccgaatgacagaaagaggagtggctctgcccgccaagctcacatgtttcccagatctgtccccaatgctcttcaccctgatctgtgttgaagggggaaaaatgacatatttattgattaaaaagccagatgtgatctttaattatgtgatcccacaaagtactctgtgaactcccaaattgacagccactggttaggaaatggcataatgttgaatcgctttctaaaagattctattgtaactcagttttgtttgtcaagttcaccctgggagagaaacacagactccccatagttttcctgggagctgaagcatagagacattgacaaacacactgctctcatctaagatgggctctgcttgctctgagatcctctggtctggccaacagtgggctgcgtttctttgcttggaaaaacccttggccaactttatcttcttctcaatgcttgtttgtccctttgcagttctaagactcaacccaggaccttgtgattgtggggaagctgctcttccactgagacacacctccagccttacacttttcaggtggacagctgtctagaatcaagcaatggtcttcttttttgacattgcttttcggctctgagacctcagctatgaaaccaattctcttagaaaagaagatgctaagacaatgggatcacgtgaacagtagataagcaaggaagaacacatcaaaatgctttacaagacgtgaatgttaccttccgtttgaatgaacagataaaacagtctttgaatgttcttaattggctctttttagttctgtatctagattatatttctttatcagatcagaaagatcaaagaaacttctttaggctcttttctcatcattgatgtttcataaacagtaaagacatctttgccaagttgccatgaattcagttaagcttggagggaaagtgtacagcactgctttactctctttgccagcaagcatccctataagcccacccttactctctcctctgtgctttgcatttccagtacactcctgctgatctgtgcccataataccagggcagaccagtgcattttgctgctggagtggaactttcataggcatacacagaaactcaaagctgggtcctgtcatatcatcaagtctccactggcactggcaatagaaaaagttactatcttgcagctgtaaggtgatctgttaaaaagacaaaaagaggcagggcccttggtgagagtcctgccttcctctcagaaatactgatgtggccatccagctattgatataacaaaagagaatggtccaggtttgctgtatctacctagtcaaccatgaatttgcaagaggagaacctcaaacagtgaaaggtctcccacagcgggcaccgatagccttggcattccagggtagccaatgaaacagcctattaagcagtgcaacatgttaccctgtcctgataaggtggagttcacagcacaccccaagccattcaagctccagccagggactaggagggtatggaagattttgtccccagggaaaggtctcagaccaagaactcctccctcccgccctacaacccaccttttaaagttttcactgtgttaagtatattcattaaggacatttcataaaagtatatgctataagtgaaggctaccccctcatatgagtctctctgaattcttccatttacttttgctttcatgtcataaacactattttatttatatgaaatctaggaacaacaggtgaaagaaaacatggtatttatcttcctaaaattggcttcatttgcttaatatgattgtccaatcagttggatccaatgtcccacagatgacataagtccatgaaaaagaatgaaaaagaaatactctgtggatatgtagcaccttctctctatctatcctttgttgttggatgcctaggttggttccctactttagcagcagagcactgatgtgcaagagtctctctgatgcgttgcttttgagttatctggagaaagcccctggagtggagcagctaggtcacgtttctatttccatcttttgagaaccctccatatggtagtcatggtggctggactactccatcttccgccagtggtggagcatatggctccctcgacgaactgagcctcactgctctttgcctgtgtagttgtcttttcaaagttcgcttgctttacttcagaaaaaaggtgtctgtgaggaaggatgatggaaggcattggcgtgcagggcggacactgcacatgctggtccaccttctgttcacgaaagcagacagacgggaaggtgtgaggaaagagcagcatacgaaaacaccaggcctccttttgctcttgagaacttggctttggaaagttcaaattcccttattgacccaggattagtctatttgtgagacagtagccttggcagcgtgtgatgtagctacttcacaaacaggcaaagagccaagcattaatgttttgggggtcttacaaggcaaggtcaaacacaaacattttcttatatttttggttgtgagcctagcctttaatggctgagctatccctccagccttacattttctatactgaatgtatagaaatgaatgtatagaaatgttacatatgttatgtaagcttacaattaaatgaatggattgaaattttttaaagataataaacacacaaaatttttattactgaattatttcggtgcattttacgggcagccattctcttgaggtccagctgtctaccctacatgcgtgactgtgatggtagaagacagcacattactacacgtctcttctcagcaggggcaccatgcctgtgactttatttttttttgtttgttttttcgagacagggtttctctgtgactttggagtctgttctggaactcgctctaggctggccttgaactcacagagatctgcctgcctctgcctccctgcctctgctgggattaaaggcgtgcaccaccaacaccaggcttgcctgtgactttaaatcccctctaatcagaggatttacaccaagtaaaccagtggaagccaaaagtcagagtttgattaatcttcattatctaggcttttaaaagggacggtgaagtccttaataatgcagactacaaaaagataatgtgggttaaaaataatgcagtgtttttaaaaagtagtgtagccaatgggcggccaagttttctgaatcacacaggattttaaattgttttccagtacttgaaaattgtttgacttcagcaaaggtgctacttttcaacagaagagtggacttctacatacacagaacaggagctgtttaagtatttctgtctaacaatagactacttgtctgtatttgcactaatgtaaaaaaaaaaaaccactttataccacatgcatctagatacacaaattattaaaatttctgtattttttgaaaggtcatgtttcctccattttaaggctatgtatgcaatttgtatgtataaacattacttatgtgcaaacattcttttaggtgaacctttcaatgttaattaataataggcatcatatctctcctgatgactgtagcatgtatatcctcataggacttaatacagccgccctgctcagagaatttaccatttctaaatagcattgaataattcatttcaaattgctctgttattgccgatcatatccttcacggattttaccatcactggtagtgatgatgacagtgatgatagtgagggtggtgttagattaacccaaaatccaatcaaggattgaatacatagacttaatatcaaccttgaattctgtcaatggcatgagtgacctccggtcatgaccactaataacttccatgttactccacaccaagtcccatactgacttgccctgctgaaagaagttttccaacttggctgcacgctgccttctctactttcctcacttatttccaggacactgtaagcacctctctcctctaagcaagccagcccttccttatcactccccagtctcttaatggtgctgtccttgactctttccctctgcaccccattaataatctcgggcagtctcctggatatgtggggtgctgatgagtcccacttttatatcactggccaatcattctcacttcaatttcaaattcacagatccagttattttttgaccacagagtttcagtgagaaattgagcaacggaaaaagcatggagactttgtctcttaatttcaacagggagaactgaacttcttttcatttgtatttgtctttgtactgatttggggtggggggacaacttcccatgagcctttgagatgtctctgagggtgatggctctggccatcaaggctgattacctattttcaacccctgaaacccacatagtggaaaggaaagaaccaatcctacaagctgtccttggacttcaacatgtatgcctccctggccccttctctctctcttacacacacacacacacacacacacacacacacacacacacacacacacactgcaacacaaatcaatgtaaaaaattaaaaagaaaactcaatcttggtcaatcaatatatatgcaaggtgattctaattagaatcaataggtaaggctattttgaaattatataaccagtaaggttcacataagaaatgaatgccaaaatgacaggaaaatggaggcacaggcttcctagaccatgtgcttaacttaaaattctagaaactccaggttcttgaccctttaccatcacccatgcacccttcacaccagtgccccaagcgtgttagcatccaggtaacacattggttcccgggggacattccttaggacaaaatagacctgctattcaaacatatcagagagtctggatctttgggagaacatgtgtccagtgttggttacatctacagagcctgtgcttcaggtcctgaatacctccagagtccagcgcttgcagacagtccccattctggaacagtctgagttaccactgcccatgactctgcacgatagcccggcagagcatgggtatgtacgcaatagatggccttcccaaagcacctaaggatattagttcccctccaagatctctctaagaaacttaagagaaggatttgccttttaacctctaaacctctggttgggggtttcaggaaataccagaataacccacaaacacgttacccctgtttctatcatcacccagaagagaaaaaccactttattttcactgatgtctttttcattttctccagttcatgggctattcccccacattttgcctaaagctctgtcccatggggagcaacaatgagcaagcagagggctggaagacttcaggatgtcaggtagtgtactggagcctgctgcttttctcctttctctatacatgcaagactgagggggtgggagcctgggtgtcactgagacactgtggcaggtatggggcctacccagcatgagttcatttcctgtgttggaagagatgggatttgcagagctcagtttctcaaatgataccatctcatttcgagggcaagtctctgagatcccagattctaccggaacagagtgatcttcagacaaagagctccacaaacacggaaggaaccaactcacgtgaaagacaaagggtcagaggtcaagagagctgcacctggattccacaggcttccaaaaggaggaaccgggttatagcaccaagccaaagaagaaaaagatagtcactcatctagttatcctagattctaacacatcttagaaagcactggatatgaaggtaaataagaaccagtctgtccaggcctggcaaggtgactcagctgtataaagcccatactgctttttcagaggacacaagcctagtttccagcacccacattgggaggaagctcacaactgtctgtaactcggttccagggatccagtgctctcttctggtctccatgggcatctgcacccagatgcacaggcctatacaaagacgcatatacatgaatgcaattttaaaatagataataataaaaacaaaataacatttaaaaagaaccagtcctgcaaatggatctcccttttcaagtggagttgattctaacgtttgctgccatgttttttgttttggtttgtttgtttagtaagataaaaatctttagtgacaataatgatggtaaatctactcttaaaatccattggctggaaaatatgtttatgtctgaataacatgtagattccttgcagaaagtgagtcagttcccaggcagggatgccctggattaaatagatgagcaacaaaaagcaacacgatgagaaggggattttatgtagctctgcatagggaggattcatatcatgcactaaaattggcatataggctgccactctcagacgcctaacacattacctgacgctcacactccatatatgtgatctcacaaccctgtctctgatattacaaaacaccatcagaaccatcatctcacctggtcattacagggaccctctaatgagagcatcattaacagttgggtgagttaagagcctggtgacagggacaagtccaagtggcagcagaggactcctgggacagagatatcatccttccaactccagccctacattgatgtaggttatgtctgatcccctaagatgttttgtgcaccacgattttttttttgatcatatcattgcccttgccatccacttaagaggtcagttgcatttattttacagataattttacatatgagaaactaaagtccagaaagatgagtcggttggccacccacggtcacagagcttggaggagttgaatccagaactaaattggaagtcctcccacctctaaaacccacgctcctgaccccttgtctcatgcctggcaggatgcgtgtgatttgcagacaaaacttaatgaaagtccctccactggggagcctacttatctacctctctccctcaggtgtcacatcagtgatctgaggtacatagcctcatcaggattgtaccaaatatgaggtcagatgctaaacagcagacagaagacagacctgggatttgaacctaggactctaggactttgcactcttccataccatctactgtagctattgtgtataggtactaggtaggggaaaaagttaaataaaccatccatcaactacaaacaagcatgtgttattatcattattattttaattattagacattgaactgaaaaagactaaacagtttagctaaaacagccatacaaggaaatgagaactgggtcttctagtttcatttctgctcctgtgaatatatatatatatataaaacaacttggggaaagggcatttgttacagctcaccatgttagattatagcccatcataatggcagaagcttgaagcatacggtcacaccacagtcaagaacagagagaaatgactgctcagtgctcagcttctgacactctcacacagtccatggtcccacaccatgcaatggtaccacccactttcaggacaggtgaccccacatcagtcggagcaaccaaggcaaatcctcacagacactcccatcagccaatgtgatctaaacagcccctcaccgaaactcattgtcaactgacaattgaaagtgagcaccacgggcctgtcccctgagttctaagcttggtccagtctccttgtttctttcagtgatgactcaattatcatcgatttactaatgtttctccttcctgggcaatacaaagtgatgctctcctgcggccattttttaaagattgagtaaatccactcagtcaaagagccttttccttccttctacccaaatttccattgtagaatcattccctggctcccatgtttttaaagagtcgctgtgtcttttctaaccatgaaagcagagacacattgggaagctcacgtccattctcggttgctacttaggagattgcaataagctttgcataatatttaacatcacaatacgaaagccccattcaagcaacgctgcagggctgcagtgagtgtcgcagatttgggggacatggctccttcctaccacaatcctttcaggacacctcctgaccgttcctttcacagtgaagaacactggcagcttagcacactggaacttcagtgctccacaccatcgtgaggatcaaccaggctgtcacgacgcttccaggaattgtacagtccatcaatcaaggctctcagagcaaataaaaggacggagttctcaggagtgtcgccacccctggagcttgtcattcaatggatgtcaaccaatgccagacttatcagaatacttccaactccgaagttagtaagaggcatctgcagaataaaaatctgttccttctcctcttaggcacaagcaatgcaactcacaccttaccactgcagtcatactaagttaatattagcctcttctgcttgcttgcagctcacttagctaagcttgcctgccattcccagcacctgtcatagcccactccaaccatactgcagattgtaagaaatgccttcgtgggcctctgtcttcctccgctatgcttattcaggttatatatgattgcttgagataatgaaatcatacatgctcacagtcgcctgtcttcacatggatgtgttcctgttctctgcttagggtaaggcagctcaatcgcaggctctaatgatgactttcaaactccatgcagttttgaagaaccctgtaggcatttctatttcctttccttctatggacaaaaacctacatgtccttacagcacaagaaaaaatccatttccctttcccccctgccctcatgtcccttgattcttgatttgcttgagaatgcactttgtccacttagacgtctgcttctatagatcacgtgttcccgcatgagcagacctaggaccacatttatttgatttcacacatttccatcatcaagtccaaggtcagagatccaaattgttcacacgtattaacatttaattcgctaataatgaatctgaccatgggacttcattcctcttgtttgtttggtttttatttgtgtgtgtgtgtgtgtgtgtgtgtgtgtgtgtgagagagagagagagagaggggggggggagagagagagaccaataaagtgaaatctggaaaccagctacatactttaggtcacaagttcatagaattggtattatttgggcttctcattgtccacgtgccggcatctcatgaacagtggacacagccatggctctggaagaaagtcagcaggcagtgaaaagacctttgagtgttctagagttcatgatgtagttgctccagcctctgctctgagaatggctgtggataaaccctactaggactcaggaaagccccccgccccatgttctcgcctttagcctaacacagatgccctgagtcactggcttatgggaaatctttctctccatcagaatgtgctgaccacagcctgtctcttggcactgatgcctctctacactggacaagccctctttccaacaatgacgttcacttattcccactggtgtcacatgaaggtgatcgatcgtccccaggctcactgggctgtgaaagctcagcttggcatggagaataccccactcttccaactcccagtcacaagcctatccggctgccaagccggtcctctgccctttcatttatccatcaccccttcccattctctcttctctgtgaccctttgcagaggttcagactcagaaccaagggaaaaggataaaagaatccaggcaagcattttataatcactcagaagttgacaactttggtctctaaccatgttccagaagaaaatcttgtcacttagtaaagggtaagcatgagttttaaaatcaaagtggggaaaatttgtaagtaaaataaaaattgagatgaaaacataacaattatgattctaacaggtcgatttgctagaaatgcctcaaaaatattttttaaaaagctagtatttttcacaaaaaagaaatgaaaaagcttcatcttcaaggagtcaagatggggtgccttgaatcatagaaaccataatgacatcctttatttactcagaatgcctgttaattcatatgaaagaggtttctaaagggagagcagagaaaagacgttgttaagctggtgtgattgcctactgtacaaaagaggacttcaggagatagtagaggcagttcaggaaaacacccaggttcagatccaacagagacacacaaaagagtggtgtacggagataaaggtggtgcctttatctttgatccatctcatgttggagaatgtggctgactcgtgaagacacaatgaaccctctatgacggagtcccagaagtgggtgcatgcaagtctgaaaaaaacacagatctccacatgtgggagcttgccctgtaaaacttgcagcagaaaaggcaggacataacgtgtttctaagcagtcaaatctctataaacacacacacacacacacacacacacacacacacacacactccacagggagggagtagctgcttcttcatcttgttcatcatggatttcacttccatatcccaaattttgtcatctcaaatttattcttcagtcagttatttcatattgcagatttaagacaactagtagaacctccaaaaagaaaagtaagcatcaaagtcagggaagaatagctcctatgtaaacgggctctgtttccattcaccctattccttgggaagcaattttatctttggcattgaagagaagagccgtagagatgaacgttagtatccgttgcatgcctacagagttcagggcattgagttacccatagcacacaacgcttagtttcaccctctcaattctgagagaaaagtactgtaaggagccgttacaagctagtgcgcatgcgcactaggtaactttgtaactttccatcccttggtctctgcctctcccgtgacgtcatatggtctgatcagctgatgtcatatggtccgatgagcttcagccagtcagggagtaacacttccgaggcggaggttgccagcctataaagggatgggtttttgggagttcagagtctccgctctgtaagcttatgctctccctctcaagacgcattaaagctttactgcagaaggatcctgaggagtgtgctgcgtcgtttttgctggcgagacagtagctcgggacaaagtacgagtgcccccacctttcctttccacaagaaaagaaactaaggcttggccgggctgtggggggaaagacaggaaagtttatcatgggtttcaatgcagaataaacacaaatgaaaccgttgtagggatgcagcaatactgattgtcccaaatggatccaaagtgggtggaagaaaagtaaacaccgtgatatggagaataaggacacaatatgggaaccaacagtcagctgaaccccaagcactaggattactatggaaaatgtgtgcttagagctggacctgggtgtgggccaccaagagccaagaaactccgatgacatgagaggaagtcaaacacctctgaacgggtcaagtggacgatacagctttgataaatagcgggaacgctctctaacaggcaccaccgcatgaccagggtgttatcaacaagggatactccaatgagctcggagaagaaagcaagctcagtgtgagaaaggggcaggtggggccagagggaaatggatgtagcagagctcccgtctttgtctttattgctctgtaaaccatgtgtttatacttcagtgtcctccatagcacacggtggcgatcagcagcagaataagccagcacttcttgcacaattcaagtgctcatgctgaacaatagctcacttgggacctaacagacctcctctcgaaaagggaagggctgggtcaatcaaatgtttgtctattgaataataccataatatctgattcttaaaaaaggaactaaataaaaggaagagttgattattttagggaaaaaatagctggcccctaataacctcatcaatctagtaatactattattgcagactgaagaagtttgtgtagaagtaagtatcacaccaactatggagcccttcaaaccctggatgtttcacacgtaaaatcatggaggggtctctaattttatagacaaaggaagtaaatcttaatccagggacttgggagtcatttatatgttgtcacctgtcttaaagatccagggcttcccaacatcaaaaataatcattttaatgaattaatttaataataacaataacttcattctttcatcatgtatgtaaacaaacatgagaaaaggagacctaaaaaacactggaatggctctggaatacctctgatctgagttcaatctactgatcccaaagagcagaagggcagaactgaatcctgcaagctgtcctctacctccaggcaagtgtgccacagcatacgtgtgcacacacatgcatacacacataaataaatgtaatatgttttctaacttgttaaataactagatagtaccagagatatcatgtcatacctattaatccgactacacctactctgcaaacagtagatgacacctgacacctggtgacagatcctccacttgactgctcagtgtcttccttcatgtttgaatggtcctgagaagacaggtgaagcccaggagcccttgtgaacacacatagaagtttccatctgtcctttgctctcagaattgcacacacacgctcaggcacacatacatgcgatgcttgctgtctgtggcaccatcacttaacggaagtaacgcactaatggatacagagatactggcggagagaagcctgggataagagtggaagaagggagcctgggatgaggaatgcagagagtcaagtcagtgggggccaagttggtgcctctgtgcaggagatagggaaagcagtgagagcctgttcataacccctctgcctgcaccatctgggaggccagcaattttacctgtcaattactgtccttccctgagccagcaaaaataaacacaccaaaagtacaggcttcatgtgagctttcaccatacagtttagctccctctccagcccttcctctaacgggaaggaaaaacagaaaagtaaactttcattcctgtgtttaaacctatgggactgcagagaagacagtgtgactgtaggagttgggttttccattttccatttcttccttttataaattaaactttgtgaagtatttttaaaaggtcataactgacgctcaatgaattgaaagccataaataatttgaaatgtgtgctagcacctggctgcttacatagggctttgctgtgtgtttgcagggatgttctaagtgaggtttacaggcagcaggtcaaagtgagaccgaccactgttgtgaagggaaacagaaggcacagaatccacgtgtgtactcacaagcttctgtgtcaactcagaaacatcactctcctttgtccctgggtggctttcattaaaaacgcatgctcatgtagcaaaaattctgcttgtaaaagaacattactcttgaagcctttttactattgaagactgtcctagcagcatgattgtctgggtaggaaatctagtgatgagtatacaaaaagctgctaggaatgacgacatagccaaactccaggaaaccagccccatgtgtacaactcactcaatgtctatataacagcaatgtggaaactttttcaatgctgtttccaggagcaacaaaaacatgatgttcttaggagaaaaatctcatacaatgtctacaaaaaaatctgaaatcaccaaaaattacagaagaacaaaaatcaatcaaatttatataaacaatgtgtagaatgtgtctgtgggcttcaaggcatagtgttattgtagagttttcccatggtgatctctagattccgtaaactctgcatcaaattcccagaaagctcttcagcagaaactgacaatctaagcccagtaccaggaaatgcaaaggatctagaatgacagaaacaaagctggaggcacaatgttctctggcttccatctttgttaaagctgcagtgatcaggatagtgaggaccagcatccatagaaacagactgaatgctggtcctcatgctgtgtgtgtgtgtgtgtgtgtgtgtgtgtgtgtgtgtgtgtgtgtgtgtgtggtgtgtgtgtgtgtgtgtgtgtgtgtgtgtgtgtgtgtgtgtgtgtgtgtgtgtgtgtgtgtgtgtgtgtgtgtatgtgtgtgtgtgtgtgtgtgtgtgtgtgtgtgtgtgtgtgtgtgtgtgtgtgtgtgtgtgtgtgtgtgtgtgtgtgtgtgtgtgtgtatgtgtgtgtgtgtgtgtgtgtgtgtgagagagagagagagagagagagagagagagagtgcacacttgtgtcccagtgtacactgtggtgtgtatgtatatgcatatatgatcctgtatgtatatgaatgatttttggtaaaaacaattcatagaatttgaatgattatatgtaacaaaagtaaatattgattcataccttttactattttcaaaaatatgtcaaagctgggcttggtattgcacatcaattattctgacatttgggaggttgaggcaggaaaaaaaaaaaaaaggtagttcatggccagactgaactacagtgagaccctgtctcaaaacaaagcaaaaaaaaaatgctcaaatggatcacagacccaaatgcccacctaaaaactagcaaaagcctttaaaaaaagaaaaaaacctctgtgaccctgacttggattaagagttcttaaatgcagtactgaggaaagattcataaaagttatataatggatttgaataacttcaattccccagctcaaatcaattagcaaaatttaaacttctacttttaaaagatattgattagacaatgaaaaacacaaaccttatgtctgataaaggacttgtgttcgaaatacataacaaaatcttaaagcttagtaaaaaagcaaatgcctgatttagcttttcaaaaaaaatggacaaagtctttgagtaatcaccaaagaaaacatataggtgaccaataagagtacaaacatcctcaccattgtaatttgccaggtaaataaaaataaaacactgcagcgtcatcactgtgtgcacactgagatgggtcacattgaaaaggctgaccatataaagtgtcagtgaaaacatctgtgaggtgacaaggacatataatggttcaagcactttggaaaacaattcgtcagtttcttgaaaagcaaaacatcctcaacacaatgatatcaactctgatatcaatgatatcaattctgactctgggtatttacctaaaagaagtgagatcgtgtgttcttacaaaagcttggagtagaatggtcagtgtagttaatgtgtccatggcagaatgtaatggccaaaagctagaaaccatttcaacccccaacagttggctggataagctcggaatactgacacaatagaaacaaaaggggatactgacctatgctggggagcattccttacactgtgcaaatgtatggctgtgattggcttaacaagaaagctgactggccaatagctgaacacaacaggcttgggcaggaaagccagactgggagaatgctaggaggaagaagggcagagtctggggtcaccagccagacacagagggagcaggaggtgaatgttccctgttaataaagattcggctatgtggtagagcataaataagtaatatgggttaacttcaaatgtaagaactagttagtaataagcctgagcaattggctgagcatttattattaatataagcctcagtgtgtttatttaagagtggctgtggaacagggaaactcctcctacatatatatctgcatcacgaaaaaactaataaaaatgactttcagtgaaagaagacactaaaataaagggtgtggattctacccacacacagctctaaaacataaaaactaacctatagatgagggttttctagtgatgggagactcaggaaagggggggggatcccaatggagcagagagaaccctaggaggcgctggctatatccatgtagtgatagattcataaatagataaatgccaaacttcaggaaatggcatcctttaaggatgtcaactcactttatattgattgtaactccataaaactattttcttatttcaaaatgcaaacaataaagatgacctacgaagacaaaactataaccctaagatacctgctcttatatcttaacagctattgggaaataaggtgggcaaactatagtttttctaaaactgactctgctgaatatgtgccaaatagcccatgattctgatagggaatttacaatagcttgtacactgaacccacccagggatgtttcctttttaaccaaaaatattgctaaacctggtgtcgaatgaatatttgcctctgagttatgtttcctcgtagtgtgtgccctgtgaccttttactcccccaaaaaaaactcagagctctgaaaatagactaaatcactaccagaaacaaaagaacaatttacttatttcccattgctcacattaacctctccatacttcctgaagagcaggaatccagttgcccttggtgtcactcagcttggtgcctagatacagagtcaggaccgtggcctgggcagaggaggcctcatcttcatgcctcatcagcttgtaaacaacttcatgctcccaatgaaggagttcctgtgtttgagtaagttcagttgcccagtgcaaatcagttagcaaataccacttctcagcaacgcactgagatgacaacgaggaaacaaaactcttcatatcttcaaagtagacttaagactccagaagcttgctaatacacaatgctttctacctcataggtgcccagtactaatgacagaccagtgcagccaagagaggtcaaagtgtcaaaggtatggaatccctctggactcctcttatggagaaggtaagggttgtggggcagagtcaatgcttctagggaggacttctcaaccagccagcagtctgtgtcaaaccatgcttcctctcagagagcattcaccacattgtcgactgaagaggagtcccgctgggcagttagaactggcaaggcagccagcaggcagagtggaggcagttcccagccactctcagctctgtatggaggaaagagaggaaaccgtgacccagaactgacgcttcctcagagcagcgcccagtgttcccaacagagaacacagcccactgataatggaactttgaagtatctggccaggggccaggggacattggaagtgtcctctggagaatatctgctttagattactccctgtgtgtaggaagccacacatgctgacttgagcctttctcctgcctccagaacccagggcctcaggttgactgatctcaagcctgctctgttggcttagccctaaatgtcaggcttagtgaacctgggtgtttttgttgggctttttccccctctggtactgcattccttttcttcattgtctcattgcaaatgttttactcctgcttgccacagccctgaaatattctatttcttttctgtggatgtttactctaaaggcacaatagagacttaggtctacttgacaatgaaatgtcattctaaactgcccaactacaagcccactaattaaaaataattgctagttttctgttgctgtgatgaaatactatgaccaagacaacttaggaaaggaagagtttactggggcttatggtttcagaggactggagtccatcacagcagagagccgtggcggcaggaacaggaagctgggagctcacacctcccagtggaagtatgaagagagagcaagcaagaagtggggtgaggctataaacactcaaagactgcccctgtgacttacttccttcaataaggctgcaccatctaactctccccaaacagcatcaccaactggggaccaagtgttcaaatgcccaagagtatagagggagggcatttctcattcaaccaccagccactctggctgaattatgagtcaaatgatatgccatccagaatactgaagcatctttcttcatatctttaaaggtcaaactcatttgataattgtttctacctctcaagtcatagactgcccagattcatgttgttgtcaatattttgaccaatatatccaaatatatgtgtgcttgattgcccctttttgtgaacggagattagctgatgtcactcaggaactaaatctttgccgttcgaagtgcagcccttggaccagcccttaatggcctgacaggcaattaagaggatgatcagagctcggcatagagcaacagaatccaaaaatcatcataacaagaccaccagtgagtcctatgtgcactcaaagtttgagaagggctcttttaaatagacatcggcccctctgagggaaaaggaaaatgaggagttgcaacacgctaactgacaaaattccaaaaaggaacttgagccaggacaccgcctagtgctttccaatggttggctctgcatccatgagtccctactggaccttcaccccacagagctaagaacgatttttggctagatgaattgggctctcttatttagacatcaaaggtgctgatcaatcaatgaaggcttctgtcaaatctgggctagaaaatacgttggcagtagtaagggattggggatgatcatgaactaaaatgtcattcttggcgccatctgaatgtggatgtcaggaaaacaaccttctacgtggtaaccagggctgccctcaagagagctcatcatgcaggctgtgcagagatgaggctgaaccccgtgagccacagagctgttcagcagggctgtgagcatgtggaatctcacatctggaagtgagcatagaggcaaagtgctccactcccaacttcacccagttctcagcagctgataatgaagcctttgccttctctgactcctaaatattccagttggcacatggagggtatcgcatgcccagactcaacagagtgtggacagaaaatataaacaggaaaaaaaaactgcatctctactgggtatgttcagactctgcctccttccctaatccatatgaggcaactattagtgcattttaatactgagtattatgagacatatttcaaagtactgaagatatccaggccatatgcaaaaacaattccatgtcacatcagtgacttgagtatccaaaaatttcttgtaatcttgaagtgtcctggagtcaatccccatagacactaagtgacaatttacctgacttttggatgtccactgccatgtaggggtgaagggcaacaaagagacaagagacaagccctggaatgtggtgtctggctctgtctatggtgatcagtacacctctgaccagaaactaacctttcagttggcctcgatgggctcaccctccccttttcatgcttagtctggctcttgatttctgtgtcaatgttccacctggctctagagctccgtctggcctcttgcctgcctctcgggaatccctctcatgaccttgccagactttctccagaagccacaacacatcctctggatctcttaaacttgtgttccaatatgggcagtggactacatggactacattaaacatacactactaatattcccattgctaggaagtcccagctgttatgttccacttgagaaatttgatttttgtattctattttattctattctatgtaaatgcataatattgcttatatgtgttctatttggttcttagtttttaattagcatgtattgaaataatgggctcggttgtcacattttcacacatggacatcaggggccttgccaatattcacccattactcttgcctgtcctttgatcacccctgcccccagggagtctcacttcaactttgacatgcacaaataccgacagatacataagataggtagatggatagatagacaaggagcccacacaggagagaaaatgtggtgtttgtataaagcaggctttttttttttttggtagaaaagtttagtaatgaaggtgctggtcgtggtggtgcacacttttaataccagcattcgggaggtaggggcagggggacctttgtgattttgaggccaacctggtgtgtatggcaaggtccaggacagcaagggagacatagtgagaccctgtctcaaacaaacaaacaaaatccccaaattatatcagaaaacaaaatgctacaatttgtatcttgagtgccctccctgacccatgtattaaggggctgtcttctagccctgacagtattgtaaggaagtggaatgtgaggtagggcctaggggaaggaagttcagtcacaagggggatgaccttgaaagggacattggatgaagtgggtttattaatttaacctggtgattccagtcccatccatttttctaaaaatgacataattttgtatttccttatgcctgactaaaactcacatacttttcatattagcactctggaggctgaagcaggaagatctctaagagttccaggccagcaccatctacaaattgatttccagaccagccaggactacatgaaatcatgaatgcaaatgacaaatacatagatgacattacacttgtggaactttctggccactgattgacagtttctatccccattgccccccaacccaggaggtatctactaactaatggggaaaatgaatacttaaacaaaggccaattgtagcttttctgtaggatgagtacaataacagagacagggtccccaggagataactaagttggtgaagtctttgctttgcaagcatgagaacctgagctccacctcccagaaaccatgcaaaaaacaaagataactgagcctggcacacattgtaatcccaaagctggggagacagagacagcctgattcccggggcttctgaaaactcagcctagcctattcagcaaactcaatgccaatgggagtcccaaagcaaagacagagtggctgaggcaatggttcagtggaggtttgccgaacaagcatctgatacccagctcccacgtgaaaagtagagaaccatggcccatgactataatcccatcatggaggggtcgagcactgaaataaaagtatctggaatgatcccagggattggctagccagatagtctgtccaaatcaatgagctctgggttcaacaagagatcctgcctcaaaaatataaggtggaaagtgatggaggaagacatccaacagtgattctagcctcaacactagggtacacacacatacatgtacacacatacatgaacacatatgcacacaaataatagatatgggtactctgtgcagatgagcccaacagatttataaacaaatttagacagaaagacttcaaggaagcatcacacatgaaaacatgtttattgaccagtttagggctcatgagctgcaatacagactgagaggacaagatttaggaaaacacagagtgaaaaagcaggacattccagaagacaaaagtagcctgatgtacctaatgctgtcagggagcttgtggcagaatactgaagggttaagaatatctggtaaaggggaacaagatcccagatgattctactgaaatgattgctcttgatctgtcaatcatacatttgtttgaccagcagtaagcagaataaacccacaaccttatgaagagtgcactggaagagggtgactagaaaaagcaagactagccagaaaataattgcatcagttaagagggatgtccaagccctgacctgcttatgaaagaaggaaaagaggaccagtgagacggctcagcaggtaaagtccattgccaccaaccctaatgaccagagaagcaggatcaacatgatggagggagagaacggattcccccaagtccccagcctccattcaggtgctgaaagagagagtaagggatggttatagacgtgctaaggaaacagaatccagagtgccaaggagaaaatgatacatggcagtgggagaggagaaaagaattggctctgcccaacccgaatctggcctctggctgtgtggacatgcacatagcaagttaatgtccaaacaaaatccaaccacagcgaggagccttattagctaaataaagagctgatgatggaataacattaacaggcatctatttataatcttaactccaaactttggggaatcagaggtcaattacaataaaaaaaaaccaaacatacattcatcaaatgtttcaaacaaaaataaaaaatatgaaaagtaatctagccacaaaagagaagcaataattaaataagaaatataaagacaaggattgttgcccgaggccatgcaattagccagagttcaccagcagcaaagccaagatgaaaacactcagagagcctgcaatgggaagctggggttttgctgtgtggtgggggggagggcctggactttacagtctggaagaccagggtttagatccctggaggactgggttagctagtgtgacctacgctcccattccaaacacaacatcgtgactaggaaaaatgaggacactgctcacttgtgccaggtagaacctagggatccttctcaatagtctacagtgctcgagaaagaagtatgcatcacaaatgtcaatcatgctgccactgtcacaggatggctgaggaaagtgacacctttaggttaaggaagtagaaggaagggctttggcatagatgcagtgaattctgctctactcgcactgttttatgggcacccatagggatacaatccagaatgctatcaagcacatgagaagcatatgtttctataaaccaatctgtggcttggctgcagcaatggaggtgaatggccttggattctgaaccacacctgaacacaagtttggctcaaaactcggctccctcatgtgctatggaagcagtcttagtaaatatcctaaattctctcatcttgggatccctcagcacagtaaaattaccgtgtgcggcaactgtgagcattaaatgcaatacatgggaaaatccaacacagtgttcaagtaagacactatttcccttaactgtttgtgagccgatgtatgtttttcacagcctaaacttattacctagtgtgtcccagagtggcttcccattaataatgaaagaatggggctacagcaggacctttgtccctgaccaacgactaaggaagttcaacattccaatcgaggaggctgaacaaatagctacttgccccggagcccacaccaacagacatttccaacttccatcattcctggagatcctgccccagataaatgcgaggccatcaagctgccaaggagttaatgggaaagagataaggagactaagtccatttggggtgggacaggtactgagccacgtggtggtggggaattctatgtgctgtctgttctccatataaacctctatttgagctgctcaatcaaaaagtcatttcttcataatcctagacctagagttaactggaagtgggaagtgtcctggattgcacataaatacccatagttccattcatacctacaaatggtgtgatcaagagaaaatgattagcttggtgggtactcttcagatgcatgttactccctggctataggcctataatcctggaatttgcaaggtggggtcaggagaatcagaagttcagggtcacccttggctacacaataagctctggaccaggctaaaatgagtcacaaacttgtggggagagaatgacaactataattcatcatacacctctcaatcttgggccttggctcctgttgccgtccctgtctctggacctgttatgtctttgagtgtgtagcagccatgagacagggccaggactgaaacaggaggcaagggggcacttagaatgaggatagatttaagaaggtatgactagccgggcattggtgatgcacgcctttaatcccagcactcgggaggcagaggcaggcagatctctgtgagttcgaggccagtctggtctccagagcgagtgccaggataggctccaaagccacagagaaaccctgtctcaaaaaaaaaaaaagaagaagaagaagaagaagaagaagaggaggaggaggaggaggaggaggaggaggaggaggaggaggagaagaagaagaagaagaagaagaagaagaagaagaagaagaagaagaagaagaagaagaagaagaagaagaagaagaagaagaaggagaaagaagaaggtatgactagaccaacagacaaattgtcatgaaggaggaggcactaaattcctgttccttctctgtccctacatcccagtgtcatcctcaattctagccctctcaatgtctgtagcgattctagtctctgcagaagtcttgtggcctccacagggtagactttatagtcatcaaaccactgggcacaagttctatgctgtgcaaaatggtaagatagcaatagccaagagcatccttgaccatcaagtactgtcaacatggataataaaagatacatacatattaggaggatggagacatagctcagcagttaaaagcactggctgctcttccagaggacccaggtttggttcccagcacctacatgacaggtgataaccatctgtaacccagattcagggaatctgatgtcctcatgtagcctccaaaggcagcacacacacacacacacacacacacacacacacacacacacacagtatacagatgtacatacaggcacataaaaataaaataaatctaatgtacacacatgtatcttagtacataccagagaaacccatgatgatctggattaggctgagctctttaacacagagggagctgagaaagagccaagggagtgctttctatttgttcattaacacacccttcatccctgtagtccagggagctccttcaacatgctattggattcacccagtaattctaaacccttggagagctgactgaggaacatcaacaattcacatggccacttccaagatgcgttatgcaaggctctttctagtgcctacatcctctggtctttgtatctcatcccatacactaaaaacacaagcatgccgtggcctcctagttctcctagggagagtcttcttgcatgatcccagctcatctctgagccacgctctggactggggccagtctcatgcctaattgagagtgagacccaccctggcatgagccccctcagcttccacagcctgtttagcttggcccatcttctccagccgctcagcagttccaaatcacctactgctcatggaagcaccgagtgcaggtaattgttttctattctgagtcatttcaggggcagccaacccctggtatctcccttacctgccatgggcagccgcaagtcagctctcctacatctggttcttaggcctggctgatgagtgtgctgtggagttcctgccaacatataacctgatcatctatctgcattattaccagctaaagaagtaatgatgcttcatccggcatttgactttattataaagactagtaactaggtgacaaagacatccacaacaagataattttcctccttccctctctccctctaaagctttcccaacttgtggtcaactaatacagtgtatagaatcgaatttaaagtggtgcattctaaagaaaaatgattccagaaacaggagacgggggggggggggtggcttagaatgaggatagatttaaggaggtatgactggacatataggagacactaaatgcctatgataataaaagactatatgtatattcatccaacaaacgtgttgcacatttattcacaatgagttcacttgacaccgatgaataaaaggaaatatccctccgttaattagaggcacagccataaagaatccaagtgaagctttaggaggggtgtgagtctgagtgtgacacttcaggtatgaagacacagtcagagaccagacaccctgaggacaggattcatctggagtgaggcagattcgtcacaccggaagctccaaggagcctagtgtgacagagaacggggatgccaagggaggaatacaactgagaggaaagtggctatatagaagcagtaggtaaatttggcaagttaggctagagccaaaccataaggctattacctatcatactactgtgtgacctctcctggggagaaggtacctgatgacacactggcaacttgatcccactcaaatggagcttggtgaaccagtgagtttgttgggcttacatataggagcatgaagactcatagccagccagctgaatcacgaaaagttcaccccagcatgggtgacaagtcacaaatctgtttatccctggagctccccatgtaactggcaggtgtctttaccagtctctcctccccagcaagcgcttacagcttgcagaaccttcaaagagggctgggaagtcttgcatttctgagccctctgagcctcctctgttcattcgttgagctacccaggcccttcaagtctcactggctcctagagtcttctgaacctccctctgcattccaggagacaatggttcaattaagaggaaatagctacatgacaactaccctccctcccgtgtcttctccaagttcaaggggtatctgaatgtcccggtctcaacaactaaagtgagcaagccaggaaagtacccctgactttatgtatgagccccagaaacaacattcaaaaccagacaaggagaagggccttcggaaagctgatggtcaatccaaagtcctgtttctcttgagtaagtaacacatgctcttggtaaaaagtaccagtggtactgtgagtggggcaggagtcagcaagtatcctagtttgccttctgttgcttctataaagcactaatcaaaagcaacttgactcatgggtcacagtccatcatggatggaagccagccagggcaagagctcaagggaggaacctgggagcagaaactgaaacagactatgaaggaggtctgcttactggcttgctctccgtgacctattcagctaccttctatacctcccaggtccacctgccccgggatggcactgtctccagggggctaacccccaccccatatcaattagcatttaagaaacacccacaccccagacaccattgcaggcaagtctgatggagacgatacctcaactgaggtcccttcttcccaagtaattctagtttatctccttgacaaaactggacagcactgggaggggtgtagcaacgtcaccttcaggtcacaaccaggacagtgtgggctctccgagtgtgcttcccacctcatctgctccctttagagtgcctaagaaccatttagacttttgtgttccgctccactggctcagtgtccatgtcagcttatattttgtgttctttgactgtgtcttaggtaacagtgacatctcccaggagggttgaagggacattaagtcagtttttttccctgtaacctgtagatggatgggctctttccccatctgctaaaaggttgaaagacaggaagacagcacagtgcaaagtgaaagtgtttatcagcaagccttaccaacttccagagcagagaaagagcctcagaggcggagagaccaccaactccgaagggttagggttcaacttgggtttagggtatggtacgtggtgattctctactctccccatttttctattgacctaaaggtgcctatataccccttctgtaggagggattgggtctctgtctctgtggttactggttggctacgtaagagtgggtgccacaaacctccgatgttctttgtggttagcaggtatggggagatccaccacatatgacagaaaatgggttatgttccggagaaatacaaacttactgctgggggcaaaaggctacaaagaaatgaaccgcccactgtgggggacagaaacccatttaaaaacttaaactgggactattgtgtccccttctctcttcctaggaacctactacctccttcccggctttagataaagtgtggagggaggggaagacagaaggagacctaggaagaaggtgatctttggtgaaagtctcacagtcaggatgagtcacctctgtgcttgcattgctgagcctagacatgagctgatttttatgtaagtttaagctgtgtgtttaaaatcacatcagctccataatatgaaaagagactagtcgtcaggcatctatcttttggtcctgttttttatagactggtctcttcagcttttcccaagaaccttctggagtacttcaacaaatgaggagcacacatcccagtgactagcctgtgccatctgcctcctgtcagaacactgggatggagattgctggaactttgcaggagacagtgttgaaccgtattcagctgggagctcaataaatcttccagatgacagcaataatccgccctgcctctttctcccgcttcttctggaatcccctgcccacacatcggtcttcctcgagcctcagtgcgcggcgttcggccccatcaatctgccgcacgttcgttttgatccaccctattcgtaccactgagcaaagtgccttccccacagtccccttctctgctgggtgaagtccctcttgtccctcctctgcaataatggagatgacaggagcacaggcttcggagggcactagtgaggattataaacgtctatccgtcttgcatcctcccgtcagtatctggcagcgggcagcactccatgcgtcttagctatcatcattccactcctttccacgtccagttcaaacgccatcactgttagcacaccatccgtcggtccctcccgccgtatcagttgctgcactttgtacttggggggggggggactgaatgtctctctcacaatagcaataaaaaggatacttcactgaccacttcgccctctactctatttcttcttctcgccatgtgtaaacctcacattagcggggaagaagcatctgttctaaaattcccgttttggaaatgagcaagcagacaggttaagctagcttttccaggatggcggaatcaaagctcaacctagaacacacagcttttcaaatccgtgcctcgcgcttaaaacatcaaggatctgctacttctgtgggttttcagttcagggtgttgttgcccctgctgttgctttcttttagctcgggcctttaaagatgtgtgcgtcctgcttatgagtatgggtgttttgcttgttggtgtgtcaatgtgccgtgtgcatgcagtacccacagaggccagaagagggcttgggtcccctagaactggagttaccatggttgtgaggcaccatgtgggtgctggaaactgaacctgggtcctctacaagagctgctggtgctcttaacagctgagccgtagctctagccccttggttttgtttttgtggtatattattggcacttgctcaaaatgtttgataaattaataaatatcccaattcccaccataccaataaaaaatgaggactagagactcaaaaataaaaaaataaaagagttgacctaggaaaacgaagagactgtcctctgtctttctgcctggtttctggttgtcaactggctctggatcataagggttctgcctgactaaaatttagtgtaaaaaatggacttagagtgctcacaaaccgagtcctggcgtggtctatggatgcactggcccagcagaggagagcgtctgtacagagccggctcttccctgtgagaaacctgctaacaaggatatcaaccggaaagtgcctcgtcgctggactgtctcacctctcctgtcaacccgtagccatcacaccctgaactccaaatgcccctcccccaagcatccaggcctcaatatgcctatgtgagaatatgggctatctccacagtcctgcaggctattgagaccatgttagggctggaaatgtgactcgggaggagcgctctcaccagcatgcccaccaccccacacatgttagtagctcacacaataatcccaatctagcattgtgttccatgactgcagtttgtctcctgggttagacagcaaagctcagtttcatagtctggcatatgaaagaccctcagtgcatacaggatgagcagacgagtcaagagtgaatggatgactaaactgatccatgaaactccctcctccttgtgtgcctccctacacaacacatcagccaccatcaatgatctcacccatctcgggacatagcaccatccagtgagcattcaccactctgattggattgtgcagaaggcaatgaagtaaacgtaagcacgtctcactttttctgcccacagcaagtagcatagagcctggtttctggtagattctgaatcaaaattaaataaaaatcattcatcattcaaaatatatccattgttcctagctttgttttcaagtgctacccggatgccttgaacttcatagaccctaccatcaacaattatgtaccccctctggacaagaaaatgtctctcctccattaattccccaccagtcagaccacttgtaccccatccagtcttcaacctaaagggttttgccccataacaggcattaaatcattcaaacagaccaatcgctttcttataaaggaaccacaagtacaaagcctgcctgtcgtcgcactgtcatagctctactgactctgctatgagtgctgtggccttcaatggcttactgtgtctgcctcctcttgattgactacacataactgacttatctgctgctgtctacccagagtcaagtggctcctgctatttagagagggggatctcttctttatcgctggactaaaacatatgtcattagaacatgttctgggggctgactagatggctcagtgagcaaagacacttgtcaccaagcctgaaaacctgacttcaattcccagaccccagatgatgaattgaaagaacagactctagcatgttgtccttagctctcacatacacaggcatgcacacacacacacacacatgcacacacaggcatgcagacacacacacacacatgcacacacacacatgcacacacatacacatatgcacacatatgcacacacatgcacacactagatagatagatagatagatagatagatagatgataggatcctgggaatagaactcaggtcatcaggcttggcagtaagtgccttcacccactgagtcatgtcaccagccttgttttagccaataatagtgagcacaagtgacataaatcattttgcctttagagaaatctgatttgagcaaatggatctgtattcccttttcaaaataaaccaatttgatgctgaaacttggaaaaggggccccagaaaaccttcctggatttcatttaataattaaaagttggatatataattcactactttttatttttgtttgtttgtttgtgctgtgttgtgttgttcagttttgcttagggggtggcagttctaccctgtctgggttaagttatgagcttagatggatcctatgtgaccttggcctgctaactgctgtgtgacaagtcccctgatctgccctgtctactttagacacatggcatgacagaaaactacattcttacagagttaatgcattgttaggatggttttgattaacatggcactgtggagcttatcctggatagcttgtcacagttgatggactgatctcatttccatgtttgtctcctcaataccaaaacttcatctaggatagaaggataataatttcttaccaaaaagctgttctttctgctccctggcccagcagacaaatgccaacatcaccctctcagttccttttcttcttcattttttccatgctgggaatcaggcccaacacacacacacacacacacacacacacacacacacctctcaatccttgtgctgccccactctgtatccttctaggtctttcacaatccatcatctgaccttatccatcacgccttccaagtgcatctggaattccacatttatctccagcctgccgcacccctaacccagaacagcagcatctctccctcacacagcctctttcacagcgctttggttcctgactgccccatcccacactgccaccagaatggtatttcgaaagcacaaacctgagagtgtcactagacagctttgagcatgtcaaaggctcttcattaccttcagattaaagcctagccctatcatgtcccacaaaagacattctgagctggtaaaaagaagctctgtaaaggtcagggcgcttgtctcctctcttcatagctgtgtctctggccctggcagagtctagaacatcataggcacccaatacacagtggcttaaggcacggttaaggtaaggcttaaccacttctttccagccttgggcatcctgctctcctgctcatgctcatgctcacactggtcttcccatgcttctgtctcatccatccctcccaagtcctcacaacccatctacctgaaatgcactaccctggatttgcccagagctagcttctctccttcagatctcaactcaaaagctacctcctcattggaggaaatcctctctgtctatcagatttaaaggaacccctcccaactctttaaaatatccaccttggtttccctacacattccagtctttgtcattgccagctcctttctgtttggccagaacatctcagttgcctggggacagcctcggagtttgatctttcctagcttttatcatctgctcctgggagatgaaaggaacacagggagacctgtcctcatccttgcagcaagatctgtactgggacagaatccctgagaaggagctgtgaacaccggcaccagggtttacacgttccatacttagcagcacttagcactgatgtgtctctttagtattttgacaactgcattgcattataattggttcccttcatcttcatctcatgtgtttgagtggatgccattacagttatcactctaacaagccgtctgcaagcttctcagttagctgaggacctgtattataaacgagggagaagtcctgcaatgaacccagatgccctgaggacatagattgggtctcagtactgagccttcagcttccagaataatgccctgaaggatctgaaacatttgtggaactcatgaggatttacaccgctggcctctgacatgtgcctggcctgggagaaggtactctgtgcaagcttctcaagaaataactcaactactgcagtcccaacttgctggtcgatagcctggcttttcaatcccagcaagttgacttcacattccaacagactgaagcaaggaatcatttgtcaagtaggttggtacactatcaacaaccaatttttacaacaatgcaagctccacagtcactcataaattacttcaagataaacacaaagtcttgaggtgaagtgtgccagattaatgaacagttccagagtctgacaaggagcttctaacgtggggatcgtcctctaagaggagttctgcaaggctggggatgggccatccatgtttcaggctttgcatggggcatattcacaagccagctatgggagtcagagaggcaatctgagaactttggaagatgaccctgtgagccaagttcacaggctcatatggaaatgccatcgctggcttgtgtcccatagccccacaccctaagcagctgagctaatcatccaagccactcaaaggaatacaaagtctcccagatacggaagaagggcaaggttcagaagaggcacatggaaagccatagtgacccaggagtcttgaataacatccttgaggcttcacttcctgctcttgataatggcaaggagcttcaaagttagccctccttccttgctccacccaagcagtcctgaccctgagtacatgacagcaaagagcaatgaaggccatgtcctcatgtatcttaccagattgctggcagcgatatcaagaactaacccagactttcttttttttttttttttttttgctacaatgtattttgagttttcttttgccaactctgtatgagctttgcttttgatccacccagaatataggaaggccacaattcacaccctcctctccttcccgagtaaagcccttcctgactagccccagggactccccaggcactcttgtgctccagtggaagggaacagataaaagaactaaacatgcacacacaatacagagcatttgtacatctgctgtttaatgtaactcggagagatggattttcaacaacaatgttaagcaccctctctccaccttaccctcagaatgagcccttaaacagtaaagaaaactaccaagaagtgtccactgctgagagctcaccatatgtgtgatggatagatactggagaagaaaatgagacccaaggaaaaacacccattgtgtaactcttactcaggactaacttataaggctgtctattgtcacttttggcatgcatttaaaaagatagtcaatgagatactgtgatttagatatgtatgccaagaagtatagtaaattttggagctgaaagaggtgtaaaggagctccaggaaccatgccacacataaaaatgtcatcacataaaataaagagggcatgaagtaggttgaccacactttccagcctggcccagaactatccagatttcccacagcttctctaggcatacccaatgtgcccccaagtttgtatgttcaaagttcagacaactcaatatcctattctctgaaaagtgcccaatagaactgacacaatgtccatcaaaattccagaagactgttttatagaactgttaaattaattcccaaatgcgtgtggtaacacaaaagaacaagacgatgaaataactgaaaaaaaaagtcaagctcagaagacaggcaccgcatggttcgaaacggtgcaaacctgtagcaaccagcagagtaccataccgtatacataaaatataagccaaagaaagtcaggggaggtgaacaaagacccatccacacacacatgaacaactgattttagacagaagtgtaaagtctggggtagccacgatggtgggttaaagtttagcttctgggtagcttggagtcaaatcgaaccagaaagcaggttctcacggagatatgtgactgaggggacaccctggcagacgggcaccttagagaggccaacctggcctctggttactgatggagagtgcaggaggcagcacgtgctccctgagcccacagctgtgcagcagcggaagaagtgacagaagcatggcaggggcggggaggggatggggagcaactcagcagctcctgagaagaccacgttgtagctggaacccactgtgagaaggacaggaccaagcttaccactttaggcaacaagactcactcaaccttactctttcctttggaatacacagcaaacattgtcatgccgttctgtccggtgtccacatctggacccagtgtctctccagcaaaatgccactgaaacaaagctcattgaaggacaggtgtaacgattgggcggggactgaggcaggagacccagaaaggagtggaatttgattttcttttaaagcaagcagaactaagctgacacagtgggtggctggcaggggctgaacctcacaaaagcacagctatgggcaatgcaaagttgaggacctgaagagatgagcgtcttccacccaataagctctaagcgggctttctgtgtgagcattgtcacctgaaatccagaagtgccattttggtctaagaccaacttcagggtggggagttgatggagggagagggggtttctctcaaacggggaacttccctctagcccctgcttcagcttcctggaagtggcccacgctgcctctttcaacctctttttttcccccttacattttctttctttttattatgttccttaggtcttcttaataatcttattctaataaccagaaatttatatttcttttcttttaaattggtctcgacttgctgtcttcctcctgcttcctcccttttcgtctttccaatattctcactttccttttccttcccatttcttgggaaggaaattttgttttgttttgttttgttttgctgttttgttctgttgttttttgagacagggtttctctgtgtagctttggagcctatcctggcacttgctctagagaccaggctggccttgaactcacagagatctgcctgcctctgccttccgagtgctgggttcgcttgcttttttaatcatctttcataagtttctggattaagctgcttctgtccccatcatccctgctgttagagaaatgggtctcacagctggccctcagatggatgtcacagtgtagctggtggagtggtgtctcagtcagggttactattgctgtgatgaaacaccatgaccaaaagcagctgggcaggaaatggtgaattccgcttacacttctacatcacagttcaccatcaaaggaagtcaggaaaggaattcacacagggcaggaacctgaaggcaggagctaatacagaggatataaaggggtgctactcactggcttgcttcccatgatcggctcagcctgttttcgtaatgaacccaggattagcagggatggaaccacccacaatagacaaggtcctccccatcaatcaccaattaagaaaatgccctacaggcttgcatacagcctgatcttttggaggcattttctcaactaaggcccctcctctctgatgactttagcttgcatcaagttggtgtaaacttcccagcacagaggtgagcacagttggctcacacagttgacacaggaaagaagaaaacccattgtaaggcaaaagaagaaaacccattgagaggcaaaaccgagaaagaatcaaatactaggaaaatagcaaattaacaggaatcagcacacacctttcgattataacccaggaaataaatggtcctaattctccagttaaaaactatctagactggccgtttagggtaaaaagcattggctgcttggaaaagacacacttcttggctaagcaagactgaaagcaaaggcatggattaaaagaaaatattctaaacaaatagagcccacgaggaaagaggaaaagctcactcatgctcaaagaagcacttgtaccaaaatcagtggaagaggatgaaggtcactgaatatggtgaaggcacaggcgtgccaggaacacattcgcctagagacacactgccatcgcctagagacacactgccatcgcctagagacacactgccatcgcctagagacacactgccatcgcctagagacacactgccatcgcctagagagattcacactgccattgcctagagacacactgccatcgcctagagacacactgccattgcctagagacacactgccatcgcctagagacacactgccatcgcctagagacacactgccatcgcctagagacacactgccattgcctagagacacactgccattgcctagagacacactgccattgcctagagacacactgccattgcctagagacacactgccattgcctagagacacactgcaattgcctagagacacactgccattacctagagagattcacactgccattgcctagagacacactgccatcgcctagagacacactgccattacctagagacacactgccatcgcctagagacacactgccattgcctagagacacactgccatcgcctagagacacactgccattgtctagagacacactgccattgcctagagacacactgccattgcctagagagattcacactgccattgtctagagacacactgccattgtctagagagatacacattgccattgtctagagacacactgccattgtctagagagagagacacattgccattgctagagacacactgccattacctagagacacactgccatcgcctagagacacactgccattgcctagagacacactgccatcgcctagagacacactgccattgtctagagacacactgccattgcctagagacacactgccattgcctagagagattcacactgccattgtctagagacacactgccattgtctagagagatacacattgccattgtctagagacacactgccattgtctagagagagagacactgccattgtctagagacacactgccattgtctagagagagacacattgccattgtctagagacacactgccattgtctagcaagagagacacattgccattgtctagagacacactgccattgtctagcaagagagacactgccattgtctagagacacactgccattgtctagcaagagagacactgccattgtctagagacacactgccattgtctagagagacactgccattgtctagagacacactgccattgtctagcaagagagacactgccattgtctagagacacactgccattgtctagagagagagacactgccattgtcttcctggattgggaacctagtacattgcgaagctctagcaaggagggtaatagggagtggtgtgaagggagaaggagcaaagtgagaggaagaggactttaactggggaaggggagggaaggcgcacgcgcgcgtgtgtgtgtgtgtgtgtgtgtgtgtgtgtgtgtgtgtgtgtgtgtgtgtgtgtgcctgtgtgcctgtgtgcctgtgtgtgtgtctgtgtgtctgtgtgtctgtgtgtctgtgcctgtgtgtgtgtgtgtgtgtgtgtgtgtgacaataataattaaagataaggaagtcatgaatttgtgaggaagtaggggagacgagatatattggagatagagagtggtagatagaaatgatgtagatacagaactcatgtatgaaattctcatgaaataaaaaattagatttaaaaagtatataaacagggtgaccatggcctaagtacattatatatttataggatgatgtcataatggaacccattgctttatacagatatttcagaagtctgtttttaataggatataattgtacttatatttcacagctttagagatgatgggaccggggagaatggagccagtaatgaggtagactaaagtctcatgcaataccaactttattcagagcatcagacatcccgagggttaagcgcaattacatgagtgaagctctcctgtgttcaagctgcatacaatcataaagacaagatgtatgtggcaaaaacataatttcccacagaggcacacagaggatagtttagacatttaattgaataacagcatcattcaataatgagtaatcggaagtaaactcactcctactcactatacctgggaggagcacaaaacacatcccaggaacagttccatgcgtttgaagaagctgaggtcccaagtctctggtcttgttttcatggtgtgttctcatgagcagacagagttctcctcacccacctccattcctaggctatgcccccacatgtgcgtgtgcacagaatgttggttctatccatttcataagacaagcactactggggcaaacagcagcaataaaataatagtgattgccttcaatatgtcccaccccgacagatgaatcatcagactagcaacaattaacaaagaacttcacgactcaccttcactaatacagcaaatggactctgtggaatgcgctacccaatgccttaatgtagactgcggcttccgctcctcagctcacagagcatctgcaaaacaacacggttagcttgtaaagtaaatctcttagaagaggcacttgttgctctttcaggggacccgggattggttcccagcacctatctcacaaccatttggaaccccttttcaggccttctttggtatcaggcatacactcacgcatgcaggcaaaacatgtatacacataaaatgagaataaatgttagtcctttttaaattgaggtcatgtcttgtatctcagggaattacaatggaaccctccaaataataaagccatgaggacatcacatgatgcattgtcgcttgataagtgggtctctgaagaaaggggagaggggaaattcatttactcaactgaaaatgaaaacatgaccctccacagtctgccacatacaacagagacagctctgaggaaaaatgtataactatgatttcctatgtttaaaaaacagggatgatgagaaggctcactggggaagagcactttcgtgatgatagcctgacacccaagtccaattcctgggacccacacgtggaaaaagaacagattcctagaagctgctttccaaccaccatccacacatgacatatgcatgtgaacacgcacacatatgtacatgcacatgaaagatgcatgtgcacactcacacatgtgtacatgaaataaataattctaagaacatagcagtcacaaatatcttaaatgagcaacataatgacgtacctgggggttgtacaaaaacacgacaaattgaaagggaaaaaacatgtaagagctgagagtctaacagaacaatacaaagcgtcagcagagcagagctgcttccctgagatgagcaggctgagccgggcggccacacctttagtccctgagctccagaggccaacgctgccagctggtctctgtgagctggaggcgaaccagctctgtattgtgagttccaggccagccaaacatacatagtgagattctgtctcagacaaaaagaaacaaggttgacacagacttagccaagccaaccaaacgaaagtgaaatatgatctaaacaacagaaacagaggaaagtccaacagatgccacccaagggcaaaggcttcgctataggctatcttgacaccttaccctacggcaataaaacctcgaagaaatcaacagatttctagacataaatgacttaataaaattgaactaaaaagataacccaaaaagccaaatagatcaataacaagttatgaggctgattcagtaatacaaaatgttttcccaataaagaaaagccctggattggagggattgacgattgactttaccgcagtgttaaagaacagctagcaccaatgttcctgaaactgttccataaaacagaaagagaataaaacttccaagctcatccttccctgtaaaccagtattgccccaatcccaaagccagatacagacacaaccagaaaggaaaaccatagatcaagtcctctgatcaaatagacaagaaagttctcaacagaatatttgcaagctgaactcaagaatacgtttaaaagatcataatcaagttggcctcattcctggaatgcaggaacgagttagcccatatagctcaataaatgtgatacagcatataaacagaatcacatggtcatctcaactgatgcagaaacagcactgacaaaattaaatatcctgtcatttaaaagaccctgaggaaattagacaatgtgtttcaatataataaaagctgtataagacaaacccactgttaacatcatactaaaagggggaaaactgaaagcatttcccctaaaatcaagaaccagataaggatgtacactcttggggctcctaatcaatataaaactacaatataatattgcatccatattgcctactcaagagaaagaaagcaaccaacgggataaaacggagaaataatccaaattctccctattgcctgccaatgtgattctatactgagtagacagcaactctaccagaaaactcttaggtcccgtagaaactttcagccaagtatgtggaatacaacataagcatgtaagattcggcagttccctgggacactagaaaaagaaatggaagaagacactaaaagaaggagagaggctgccatgctcatgggttgttagaattaagagcatggaagtagttgtgttatctacagcaatctgcacattcagtaaatccccatcaaaatcccactggcattcttaagacacatacaaaagccatctacagtctacatggaagcatcaagaaccttgacgagccaagcactccgagcacaggagcagtgctggggtattacagtagctgctgactgagattatactatggagccattgtaaccaagacagcatgatactggcacaaaaacacacatgtagacataaacacacagagataaacacatttttttaacaaatggtactgggacagctgggcatttatttgcaaagaaagatatgagagagggaggggagaaaaagcaatactacattacattcctgctcccttggtccaagctgcaatagggtatggaagcagtcagccctatgtgaagtattatctgtgtgtgtgtgtgtgtgtgtgtgtgtgtgtgtgtgtgtgtgtgtgtgtgtgtccctccccctctctctctccctccctctccccttactctctctctgtctctatctctgtctctctctccctccctccctccctctttctccctccctctccccctctttctatctctctccctccttctttctctccctccctcttcccccctctctgtctctctctctgtctctctctccctccttatccccccctctctctcacacacacaatttggataacctcttttaatttgggactgtcctatacgtatagaccctaaggaccacattcaaatgcaattggttaatttttaatgggtcccaaaagatactgtcagaagaataaggagacagggaatggcagggaattgttggtaatggatctgttgctgagcaagtgaccactctgggcaatttaagctgactagtttaacctgagtttaacctgacgagtctttgggagccagatgcacacccacatcacatcactgaacagtgcagagaccaatatcacagcactgagcagggaggggacccaggtcacatcagctgagcagggaggggacccatgtcacatctctgagcagtgagaggatcaggggactcacacatcagctcctgacactcctcgtttgagccgatgccacctctaacaagcttagcctaggcggtagtttgtcttattaaactttgatcacaccctgatgtggggctaagtaccttgccagccggatccatctctgcatgatccaaagccatttccaacttctcaacatagatttgaggccagaaaaacaatgacgattttgccctgttgaagctgagtggtatgcactgaggtgataagattgcaagaatagcaatggttactctctgcagctatcaggacgcccagatgcaaacaaaggctaggtgcttggtgggacatgcctcacaaatacccgtgtactcacctgtgtttctcagcctcaacaccaagcagctgtgaacagaaatgatctggcccatgccagaacccaaacatttatgagttggtccgcacctcttttacctctcttttcataccacagcaactcaaaagtttcatcttccagactgagaagacacctgtagtctaccactagctactaactggatccacaagttgcccttggaaagaaagctggattacaaactgcaagaggcacagctgtctttgtgcaaagggagacaaacctaaatctgctaggaatgcagattccctagctcattgctgcagcaaaggtttacctaacctgactcctacagacaagaccttctgtcccgattccagttttatggattcctttgacagttacttacagcatgctatatttcatgcagtatttttttatgctggatataaaacagtgggaaggaagcctatgtggaaggtaatacatactagtgggaagccacttggctgacataaaaggaagaccagaattctaagaggttagaattacactagaaggggggtcacgaggtgcacataaggcaaggctattaggaggggaaagggcaaatgtgggagctgggaagctagtttaactgttatggtactcggcacccaagcatgaagacaagagttcagaacccatctgaatgccaggtagtccaactataattccagcctcagccgatggagacaggatccccagagcaagctagatagcaaggcttgccatgtagggagctctggattttgttgcaagagcctgcctcagtgagtcatgtggaagacaaaaagatgatgactcccagcatcaatcctggacctcaacatatgagagcgtacacatacacatgcacttacacacacaagtgaaccacacatatatgcacacatacgcacacacagacacatgccacaaaagaaacagaaaaaggaaaaaagtcagacttctctttgtacttaacatttactgaatgacaactgcagtttgtgtttcccaataacctcctggatccgaacacctgaactctagctagcggtgctattcggaaagttgtggaacctttaggaggtagatctcactggatgaagtgagtcgttggggaagcgggtcttaaggttttattgcctggccccatgtcctgcccactctgcttgtcatcagcacacagtgtgactagccacctcatgcttgtaccaccattccttccccactgcaatgggctgtgtcacccaaactgtgagctaaaataaatgcttacctcccctggggcttcttgccaggtatttgttcataacaatgagaaaagtaactaaacatccattatgggccagggcatctgttggatataggaattggaaataattaatattatttctgaccttggccagctgagccaagcaaggagagacaaatgtcaaccaaatataaaatccttggtggctgctaaatgtcttattaaaccttaaattcagcttgacccgggatagatacctaataagtttctacaaaatacactaaaagcagaagtatgtcattgaccttcagctgccaagaaaggagagggaccagctcacaccccatgcggcccgctctcacccatcttagcccttacttcctgcagtaatcccaaaacacaggactcaaaacaagaggccacccaaaagactgtggtcttgtggtgtgggcgtcaaagctcagcagctgtcccaagcttgatctgaacctgcaagccagctagaataactcataaagtatggtgctggtggccctagggactaaaatgcagtctgcagctcccatttgaaacatcccacctacaactttcattacaagtccctgagcgctcgactttaaggcctctagcactgccttcaacctagagggatgacatcagactagacacatctggaagagaagtcacaccagggcatctgttaagagttgaggtctcctgtggctttaccctcacttcggtgctcttccacaaaccccaccctcacccttggcgctttccgccaatccttctgcccagccaggactctctgtttctggctgagcagagcctagggagagtctggcaaattctactcttaggaactaagacatggaattgagttgacaactagtttatcagcacgacgtagagtggggttgtccctcctatacataaagacacagtacccacggcctccagctttcctaggcagcataggaaactcggggcattatggccaccctgaaatctgaagaggaaagagttctgacttgccctgttatgccatgtgtctattcctaattgatctttagtgcattctccccacatgcctctgtggtcactgttccacctccaccccttggtggctctgcagtggccaattaaaacagatcccaggtgtctggagcgagaggtcagtggttaagagcactggctgctcttccagaggacctgggttggattttcaacatccacaacgcagctcacaacagtctgtaactccagtcccagaggatccaatgccctcttctgacctctgcagacactgcacaaatgtggtgtatagacaaacacattcaggcaaaacactcatacatgataaataaataaataaataaataaataaataaataaataaataaataaatgccaagctgtgtgtggtggttcgaagtcatttttggaattcaagaccagcctgtttaaaaaaaaaaaagtgttttaaatgacaatagatggcattcagctgggcatggcggtacatgtcgtgtctgcagtcacatcaatagggcgattgaggcaggaacatggcaagttcaagagcagcctgaaccctatggcgagagcacacaggcatgcacccacacgcacgtgtatctaaaatgaccactgtaagctaccacccccacttatccttgggcaaattccttttacttagctaatagctttggacagaaaacagccatacgaaatctagcacaaggcaccacgaggtatagcaatcttttcttgtgagatatcgagcttgccccactgctcaccccggcagttggaagtggtgttaactgaccctcagatcagcatcaggaaccagttgctgtcaccgccaatctatttttggagctaactgcaaaagaaacacaggctcagtcatgactccttttagaacaacatctgttgagccttcatctccacacccccattcccaccccaccccccacccccaccctgcccttccctttagccccaaaaaagaaactggattgtttttcttttcttcatcctttccccaccccaaatctcagtacaacaaaccacagcttacctatgtggaacgctcaggaatgttttctttttgatattaaaaagtcctcctgccaattaggtaaacactagccatgccacagagccagtttgttattacagagcacagagcagcacaaacccaaggtattttcagaattgcttcaaaaggaaccccaggctctggctccaacaccaggaagagatgtaaacacagttggatgtgccaggatgcaaatcgcagcagcatgcttactgggcaaccatgacatggaaaagtttgactcaactgcagatcttttcacaagtggccttgggacccattttaagatcaaacatggcgttcctaaagaatctagcctcaacagacaggctttgaagttgcctcaacaaggcacaaaatgacaatggtggcagaaccattcacctgaatacacttctgccccatgttctgaagagtgccacactcttgggatcaactctacaagaaggtgggaacggaggccgatacaaacgattgctttcagatgtgtttcttttcctcggtatttgtgtgtgtgttcacatgtgaatggattcagctgtgtacacaggtgcagaagtacacacatgacgatatccagatgcaacctcagtgtccttcctcgggagccatccaccatgtttttttttttaaagcagggtctctcattggtctggagcccatgttgtaggaagccaactggtcaggaagccccagagtcccacctgtctctaccacctcagatctgggattacaagtgtgtacctccatgtcaagctagggtcctcgctctatgttcgtcttactaactggggtttcttcccaactctcatctaggtttcaatacaaataggtagtgtgatgctccaggatgaacttgcagcattcagaaacacacccttgggtgaaggcagttcttttttaaggtttcacagaaggaatattcatgctgtctgttctgcatttgatttgtttaatggcaaagggagagccctttcaattctccattcccccagagagagaaattttcttgattctttaacagagtatccaagagaagtaagaaataataacatccccgaataaacgccccagtggtacccatcaggatttagtcgatcattaatgaaaacaacaaaaacgcccccaaggcttgcatccttccctgggttctgagttacttttgtccatggcatccaagggcaagttaattttattaagaacatttttagaaagctagaatgtcagaacctgacactactctctttccagagctctattcttggtaacatcattaaatattggctgggcccaaaggcaggttgcatcttttttcaatctaacagccattccgtggagagcatttgtttttcattgctgccaaggaggcaatctggctctcgtttcctttgaagaagagcccgttaggatgagtcaggtctacatagggaataattaggtcaaataaatgagtctttccagctgcctgtggcatcactcaacacccccacggtgagatgaaggagccgatgctggagcaaacacgtagcttatctattgtgaattacccctccctcccagaggatattctcaacatgttctcaagactattatgggccctctttttgcatctggaaaagtgaaaactgatccataaaatcttggggccttcccatctcttccccattgctacaagagaaagtttctctctcttgaggaaatatgaaccagttggcagacatggggcagccttctgtcttctgtcaccctggtctccacagattcctagatgcttaaacctgaaatgtcatgtccaatggcaacaaaaagggaagtttgtggatgttgtggtcctatgccaattctcatcagtatacctctccagctggtgactaaagctcaggccagcatctccctgtgctactcagggagtcccagactctcaggtagctcaccagtgcaggggttcaacaactcacatgatcattgtgaggttcgtgtgtggctaaattagaaagacctccccttcccacatacggggaggaagaaatggaaagactatttcattcattcatatacctcattctctccctctccctctctctctctcactctctctctctctctctcaattctgcatggtggttttgtagtgtgtgtgttccctggaattagaaggtgttttagcagaagaagccttcaaaatgacacacacacaccccacacctggggcccatgttcctacaccagcttcaggtaggggtgggtaatgctggtaagctcttagcagccccttcccatgtgcacactcgaaagttccttaacttgacaactaatgaataaataattttcttttgtgggataagaataattgacctttctctcctaaatttctacccttggacaagaaaaaaaaaatcagacttctttgcaacatgggaaaataaatagtacttaaagtcctgagaaatgccctctggatgctttgaaaatcactcctcgtgtgcaggtataccctgaacagatagatacacaagatgcaccccaacaggaatggcttccttggtctttgcccagacccagaaatgactcccttcataatgtattcatgccacttgtcccactcctgaacagagttccaaagaattatctggtgagctcagttgcctaggagaacagatcaagttcgttcagatagatagctgcaccctttcgaaccattaagtaaacttaaagagcgaattagaccccatagcccactcccacagccatctcctgggctgcactccagccatgggattttcccagtggggttggggccaggctttcagagcagagccccactgccaccaccaaggcctggctgtgtaattcataagaacaatcagcgacaatttgtttttcaatttctcacatctggtggctactttgcgaatgcttaaccagcagcaagaagggtgagagtcagggtaagtacacgagggatgggactgagatgaaagagcagacagggcaaaaggagccaaagcagccccaggaggtgagtgccaggcaaagtttggagatctctaaataactgctgtcatctgtctgtctgtatgcctgtatctatgtacgtatgtattctctctctctctctctctctctctctctctctctctctctctctctctctctctctctctcccatttctgctgctctagaaaccctgaactatgcttagccataagctatgcaaatactgatagctttagaaaagtccatttctcatcaggatcagagcaagttccctttgacttcatcccctcacattggttttacatttacagtaaaattgagaagtaaacttatttcccctgtgccctagatcttaaacacgaacctctcacactatcagagtgtgctgtgggtgagtctacaatgatgcctcactgtcacccagggtctggagctgacgagagctccctcttctgtagtctatgaactcctaagcatttgtttccccagcactggggattcaactcctttcaccatgttagataaactctctacctctcaactacatcctcagacccattttatggggtttgattcgtggtaccactgtatcctaaagacttttcactagcccagacctgctgggaagcgtttggtatctacactgagatgagcatcatagccccacaatacagtgggaagtgtgcatagcagggtcagtagttagtcatgcctataccctatgtgaacgtcagtgcatagcggagtcagcagttagtcatgcctataccctatgtgaacgtcagtgggtcagactagtctctgagtttccattttcccatcagtcaatctgggataattacacttatctcagataacttgagtataaacactgttttttagaaaggagatggcaaaagttaacacagttggtacaatatctgtcacaataaacaccagcgtgttccctccacccttggtgtgtatttacagccataagatcaattcatgagaaactaattgagacatcactactcatcttattgatgcgggaggtccttctgtgtgtatgtttgtgtatttattggttgataaataaagtactgttggccaataggaaagcaagataggcagaactaggagaggaggaggattatgggaaatgtaggaaagagtcaaagtcaccatgtgatccctgggaagaaaggacaaatgccactgacgtcctctaagataagtctttataaaatatatagattagtagttatggttgataattcagactgagctagcaaataaggaatactagtcattggccagcagtattgtaattaatataacactctgtgtgttatttggggtccctaaagcaacaggcagaacccaggcatctggcagaaagagtaatcattacacagtagtacatgtgggggtcagaggtcaaaatgaagagtcttcctctatcactttctaccttatttttttaagacagaaccttcctcactgaacctggagctgactcggctacactggctggtcagtgaaccagggatccccctgtccctactacccaagccctggataacaaatgcatatgagggtactggagttgggggagaaaaaactgatcaaaatatactgtatggaaatttttaaatgaaaacaaaatattggaacattaggaatggttgagggaggtttttcttagagaaccctcaccatctgtctgcaaatgccagctagctcccccccatcctttgtgaggagtctctaagggatctaacattctatgtctaaggggttacagttctatgtctaagggtctacagctctatgtctaaggggtctacagctctatgtctaaggggcctacagctctatatctaagggtctacagctctatgtctaaggggcctacagctctatgtctaaggggtctacagctctatatctaaggggcctacagctctatgtctaagggtctacagctctatgtctaaggggcctacagctctatgtctaaggggcctacagctctatgtctaaggggtctaccgctctatgtctaaggggcctacagctctatgtctaagggtctacagctctatgtctaaggggcctacagctctatgtctaaggggcctacagctctatgtctaagtggtctacaactctatgtctaaggggcctacagctctatgtctaaggggtctacagctctatgtctaaggtctacagctctatgtctaaggtctacagctctatgtctaaggtctacagttctatgtctaaggggcctacagctctatgtctaagtggtctacaactctatgtctaaggtctacagttctatgtctaaggtctacagttctatgtcttaagtggtctaccgctctatgtctaaggggcctacagctctatgtctaaggtctacagctctatgtctaaggtctacagttctatgtccaaagagtctactgctctggtctaagagctctagattctatgtctaatgggcctacttctctatgataacccttcaaaggagatgagttaggagaaatttacaaacccaaatctaagagttgctcactagaagaccaagtcagccaaggagtgatgtttccagtctctcgggtccagcattccccattgtggcccattccacagctcaacagtatctgaatccttacaggacaggtagttctggtgtaggtatcaaaaatgcagactcttggactccattccagaaatttggctttgatttttgtttgcttgttgttttgagacaaggtctcaccatgtaacctatactttcttttaacttgctatgtatcccaacctactctcaaattcaaaatcaccttccttcatcctgggaagtgtcaagattattggcatttaccatcacacccagctcatcccagaacttccaaaaggaatctctgaagatgttcttcacaaaaagatggggctagcaagatagttccatggttaggaacatttgccacagactcatgaggacctgagtctggatcaagccaggctttatctcagaaatgtaacctcagtgctgcaagaagagacatgaggattgctggctgctgaccattctgaaaagcatgagttccatgtacaggaagagaccaggcctcaaagacataggtggagagttataaagacagcaggtgccctcctctgatttccacatgcgtgcacctacacacacacacacatgtgcctacatcacatgcattcccacacaacagggaagcagagataggcagagctgtaggagagagacagaaaagtatctatcaaaatgctacaatgaaatcattccttccctgggttaaaaaaatgaatttataaaactatgaaaatcaataagcatttttcacaacaaatatacaccttaacagattgtgtagagccagaattgtaatgtaaaatgaagtattttttaaagaagacaaagcattatatctatcattaaaaagagacaagatagataatgtgttcatgggggcagaagaaagggaggaatggaaagaagacagatttcatgaaaaatattttgaaagtgttctgacaaaaaaattatgaagttctataaaaataagtgaccaacaaaggatattcagaaaagataaaatgtacatagaatttgaaggataaaaatgaagacgtcggttgagacagatgtgtcctccactttcctttgtgggttcatcactctcctgttgtaccttctggcccccttcaatctccctgatctttgccttctacacacatctcctttccattatcctaatttgtgtccacagtagcttttccttccatactgttgttgaaatctttagagcaatcccttttactcattctttgtcttagagagactccatttacttattagttgaatgtagcataggaacaggatggatcctggggcccacctaaatcctcactcctatgttcagtgttccaacctgaacatggttatgtgagaccagtatttggtttcatgatgtccctctatgcagacctggagattatgtgacaagcaaaaacttaggtaacaagtgagaaccaatttaagaaaaaaaatcacaaatgagctttgagagttaaatgccacagaatggtagagcaagccacacaaagctgaaaatctttgaggcataaagggagagaagtataaaaataaccagggtagatagttctctggggaaagcaaacagtaaatgggtgacagggcagaattctagggcacagtgtttgatggctgtaatagaagaaggtggaagccgtggtagctatgtatagtaccggatattgtgaggaaggggacttagtcctcaggtcccctgccccccaaaaaatgcaataaaaataaaagatgttcattcagaaccaagaagagggaatataagtcaaggctctttaccaagccacaaatcttcaaagtgtttgtaagaatcactttgaaaagaaagttaattcagaaaattttggtaaagaaggaaatattaattaaatataaactaacatatttgtgcatttgtttgttccccttaagtgtcccacaaagtatctaaggcatccgcaagcatctcaggctggataaaagccaccacatcatagaatgtgagctgagctgccttggccactaagccaaggacccaagcaaatagattgtaaacaaggctcccaggcactaggctcttaaacagaaggaataaagctgtggagggctgtgatgagaaggggcagttcccgcaggtgtacctgagtggccaactacttcccaccacatcaaaagtcacaggcacattccccttccaaccaccaaaacattttaacagctgggaattaaaataagctgtcagccagctcaaaaagattttttaattcaaaataaatcaagctaacaacctgcagatgtttggaaagaaaatgtttcggtgactggttttcaagatccaattccctagccttgctggttcagagatgggaatggttcaaggatgggagtgctgcctccttttggcttcaaatcggaaggcaagctgtggttctggctctctcacacctaatataggtccgctgtgtccttgaaggatcatagattctatctagcaaagtgacctaaaattggggatcagaagcagagagtggagggctgaagatatagatggctccttcggtaaagagctatcccctcaagcaggaagaccagagtccagactcccagcacccatgttaaaaggctgggtgctgcagcaggcacctgtaatcccagcactgaggaggcagagacgggaagatttctgaggttcactgggaacctgtctcgacaaatcagtgtgctccagacacactgggagactgtctcaccaagagaaggtagagagcagctgagtaagacacctgacattgtcctcgtgtgggggagagagcacaaagaggttactcaggtgagtgagtgttactggatcccagagacccttcactccctacccaaggatggagagaggcagcttccctcaggagccttcatgcgtacctccacactgaccttgcacacatcctcagaggaactagagatgatctcagcttaggctggaatgataggccagaaacaaggtgaggattgagggaaagaggacactgcagggaaagtgagacacatcccaagctcaaggtaatagccaaaaacaggtaagtgcctgagtgcctagatccagggccagcatgggggtgcatgcatgagaggtgcaaggatgggggtgcaagcatgggggtgcatgcatggggagggatgcaggcatggaggaggggtgcgtgcatgggaggttcaagcatgggggggtgcatgcatttggctgaccagcaccagcagaagaaggaaaggcagggcagcagctcctccacctgagagccatctcagccaattaggacctgggctcttgcagctggtgtatatgaaacaggtcataacactacatgcaggactgactccggctataaaggctggagaactgctgggtgatcaaagtgaggatgtggagaattgcagcacaccggtgggactgcagcatacccatctctttttgcccagcagatgtttatacacctcctggaagacagtcccctcctcattgtcatcatcctccagttactgatccttagaaaccatctggggcctgagattttgcttctttgagcatccgtgacttttctatcccccaccccacccaaggtctcatatgtagcaaattcagtaatttgtccataggtctgtctccacctctccttgaaagtgagagctgtgtcttaccacctcatgttctccgcacacaactcaggatcagcttcctagtaaccattagtaaccgcttgctgacttagccaactgagtttgtcaaagagaacatcattgtgtgtgtgtgccacctgtatgcatgtgtgtatgtaaaaggtgtgtacatatgtgtttggtgcatgtgtgcctgtgtgcacatcacagtgtggaagtcagaggtcaataccccatgccctcctctacagccctctgtattaatgactttcctactggccgtgataaaaatatcatggccaaagcaacttaaggaataaagactttgttttggctaaatcaaagttacagagagctgaagttcgtaacggtgggacagacatggtagcaggacagacagaaagctgtgtggccacatttttatcaacacacaggaagcagagagagtgagcaggaagtgaggtgaggttagaagccttcaaactctgcccccagaaaggcaccacctcctaaagcttcctaactcccccacacaccaccaacagctgagaacaaaatgcccaaatacatgagactgctgtgacgtttctcaatcaaaccacagcatcctccacttgagtttttgagacctgtcgctgagcctggtgctggtcaattgattatactggctgggcaggaaactcccaagctccacctgcccaccccttccatgctagggtcacaggtgtgctctgctacacccagattttacatggattctgggcttgtgacttccagtcctcactcttgtgcagcaagcactgtgtacacggagaaatctccccggcccttgttttctttaagggagtaaaactccctttaaaactcaaagatctcaaaagttctctagaaagaaagttaatacctcaaaattctgacaaacttccttggactagagtgacccttaagaccagaaattaaaataataggatatgtttgacttacttgtttgatcaaactaagaggaggaagatgtctctgagagtttatttccaactttgaggccttctcatgtctcccagatacagcacaaaataagatctccctgaatcccattgagctgccacaaaagatgaaagaccactgataagtaaaagatgagggaaaaatgatgtttcaccaggaatcctgtttggttttgccacccctagctctgaatggggagggcagcatccctactccatcatctgccttcaactagtctgtctcactagaattggcaggtctgatgtaagagaatcacttgattactaaaccttcttcccttcccaggaaggaccagtaagcataggctgaactcagggctctcctgcactgttcaggtaaactgccttggcttctcgttacatcaaatcccggtaatcaaaatcaagcatctttgtacttggctccatcgtctactggtcaggccaccctgagtaagtactattatttttatcagtaaataaaagtcatgtatgtccttcatgtgtgccaggcaccattccagacactggaaatgtagtgggtgggtggacaaacccagtctggctccccccagccttaactcccctttttggtaaatgggcttcttgcataaggggatctaattaggaataagcgaaatatgtcagatattaaacatagtacctgctaaataatatggactcattacataaaagacaacctgagttttgtttgttttgagacagaagctcactctgtagcccaagctggcctcaaactcacagagatcttgctgctccatccttccaagtttttggggttataagcataagccagttctcctggataaaagatgtcattataatgattgatcgagtgagataacatctaaatgctacaaattaggaaatataattatattactataatacagaaagcttttagaacaaattgttaaagaaaatataatttttcaactcattaaaaatgaaaactgtagaagctgtttccatcccccggctactggggccagagcagcaatgaacttgcatgaacaggaatctctgtagtaggaaatagaggcctctaggtccacacctgagagagggacagggggaccatgtggtagagctatttctaactttttgaagtacaaattggactccattggtttgttgttgttgttgttgtttaatgaggacccaatatcatgtgaccatagaatggggatgtggacatgagaggcactgggggaggaagaatggatatgtacaacatatattgtctgaatctctcaaagaattaataaaatattttaaatgcagactgttatacatacaagaaccagagtgtgatgttggtacttgtgttctgagtcttcacacttctaaccatcttgccttaggtataggggtgggccaccaagctcagctctgcacactctggattctagaaaacacgtttgagtaggctgactccctacaggcactccctgtgcccagatgcagcatatgacttgcagctgtcaggaaggcaggcccatccccctttgctttaatgggaacatgcaaacatgggtggggtggtgccgttttacatctgtctatctcctcactcagaaatcaggtcactgagaaccggagccactgggtaccatagctttctccattactgaccttcagctcagttcctgggatgtaacaagggcttagtccacaaatgttcactatttaaaacataattgttcaatgagtgaataggagaggaaaaacagaatatattacttaaaccctcatcaacttcttatatgcaaaataaatcatgttagacacacagacaatgatgttactacttatcaagagttcaacaagcatttaacaagcacatggctaactgttgtatgcacagccatgtgtgagactctgtgagtgacagaaaagcaacatagggccagctccgtggtagagcatgtggttggcatgtgtgaggccctggtttcgattccccaacattactaattaattaattaaacaagcaaacatttggctatatgtgatatacgaatatatgtatgtctatgtcgtatagagatcgtagtcacagaatacaaattttcaaactttgaagactaccagacactttggcaagcaacttacacaactgtacctgtcactttataaactacgaagtcgaagttgaaactagtcctggtgcatgcccgtagtctgccccaggtgctcacagactgagcaagatgagcagctgaatctgggaacctgggacaaatagcaagaccaaaaacctgtgggcggggcagggggaggctgaaagcagagcattagacttgatcaagaaacaataaccgagatctctgtacacttaccatctgcaaatatttttcaagcattaactccttttattctcaaacctacatcttccttagctcctctgtggctgtgaagagactcagacagaagcaacttaatagagaaaagattttttttctggctgacagttctaggctgcaggccatcgtggtggggacatcagtacgtcaggtactcgaagaagctggtcacacgcagcacacccaaaatctagaatcaggggcatgggtgaatgtgtgctgccgatgctgcccagcctgctctccccagctgatacgatcagggatccccagataacagtccatcctcggtgaaaacaggtcttccccatcaattaactaaccaagataatctttcacatccgctcagaggcccggctcccaaaggattctagattctgtcaagttgacaatcaatattactcttcatgtgatattatgaagggcaagttcacagatgaggagaaagactactaagtagatcagataatttatccaatatggaacaaaatcaaatgaggtaggggactctgttggtaccttgtggtaccttgtgctttattaatcaaacaacgggcatgatcccaaaagcacagtgtgggcaaaattccaaagctgctcacctgggcaccatggcacaaggcagagcaccccatgaatggccaggactattgccttcatcagcaagcagggttcaccaaacaaggtgtctgacagataccatcttctctttggtgattctgattaggtcaacaaaaggaaagcctcttagaaagctgttccttagaagagctcctctcttctaagctttctctcttcctcactgtcatcctcccaacacacatacatatacacacatgcacacacaaatacacacacatacatacacacacatacacacacaaatacacacatatacacacacacacatgcacacacaatgaacacacacacacacacattctttcttgaaaacaaaaataaatgtagaaagatacgttggtaccttagacccttcccaagccccacgatcactcagtccaccacagcagcatatctgggtccattgtcagtaactgactcatcattctccataagtccctgcccccagaagccctaaaagcccaagatcaaaaccctaaattccctctacaagccacttcacctcctagtatgaagagacctagacagaccagtttggattgtgcattagttacttctctatggctgtgataaagcaccagcccaatggaactagtagaaggaaaacgggatctgggcttatgggtcgagagggacacggaggggggtcgtggcagcaggcagcctaacagaccacagtgcaaaaagtgctcgtctgaggcatgaggaaggttttattcacttcgttgctggttttgtcactgttactactgtcgtcgtcgcctttgaccatgttttcagaaactttctggcaagcaatatgcatgccgtttgattgtgcctctcactgcaaactgaagacacgtgcagcgatcgtgttctgtgaaatgatctgcacagaggcccatgtacttcataaataccagctctctggttagatgactttattcaaagggagcatgaccatgactgaccatgacgagatacatgaacaaaaaaaagtgttcagatctgaggctcctgggaagacgttggcctgaggatgtgtcatagtcccaaaaaccacttgttctcttcaacaatcaaccagaaaagaggtgagggaaaattctctagtggaaatcaaactaccaggcaagccctgtactattataaatcaacaaatatatacaggtatatattctgtatgtacatatatgtggctaacagagtcactcttacatacaagccaaactgaaaagtgattcagagggatgaaattaaccacagtctgatgatgaatggctataatcctagcatctgagagactggggcaggaaactgcaagttctaggctagcctggactcagaagaaaggggagggggaaagagataagggagggagggaaaagggacaaagagaggaagggagggaagaaggaatggaagagaagaaaaggggactggagagggtcaaaaacagggctgaggaaatagctcagtcagtgaagggtttgctgggcaagcatgagagcctaggtttgagtcatagaagccgcatttaaaggtcagttgtggcagctgggccttgtactcctagtgccgaggaggcagaaacaagcacatcccagggctgacttgccagccattgtagtttaatcactgacaagctccaggctgtgagacacacttcccgagcaatgacacccaaggttgaccttggccttcgtatgcacacacacgtacatgttcacacaagtaaatacacacacacacaaattaatagcagctgactataccccaacacccgctccccaaatgctcacagcccacacccacaaacagaatattgtaatcttcatttctcaaattatctaatgcaggaccaagagccttggggagtgtgatcagactcacaagttggcatattgggtgactgtgggggtggggacagagtatgagaaatgcctcttcaggcccagcaagggaatgcagttacatcacagaagggaaaaaccacttcaaagtgaagatattggcagcctgaatcccacaaaggcctgagctgaaacactacctatttcaccaggcctggagctaagagctaaacaacttaattcctccactgagcctcagttaatggtggatgcctggatctccctggcccacccggtgcagtttgtctttatgtaccagtctcatattttgggaagctatatagatgatggaaaggcacgaattagaggcatgtttttataggagaaaagaaggcatagcttctttttagttctcccacctgcaaagtccttttggagctcccaaccaatggagaactgttaggtgggaaaagggggaggagcagggctgcactgtaagaccaggaggggttctgggctttgcctctagacacacaaatctgaagtgatcctctcaatcattgcttttcataggaaaggtgtgtgtgtgtgtgtgtgtgtgtgtgtgtgtgtgtgtgtgtggtgtgcattcatgtgtgtgtgtgtgcattcatgtgtgtgtgtgtgcattcatgtgtgtgtgtgtgtgtgcgcgcgtgtgtgtgtgtgtgtgtgtgtgtgtgtgtgtgtgtgtgtgtgcatccatgtgtgtgtgcagatacacatgtgttgcatgtgtgtaggaagatatgtatgtgatgtgtgtgtgtggtcatgtgtgcacgtgtggtgtgatgtgtgcaggttcagtgcacatgtgtggtgtggtacgggtgggtgcatatgtgtagtatgaatatagaggccaggtaccattcctcagatcctgtttgcatatacatgtatttgtgagagacagagacagagtatgtgtgtgtttccctctcactggcctggaagtcatcacataggctagtctgacagaccagtgagcctcagggacccacctgcctctgcctctcaagcactgggattacaagcacaggcaaccacacttgacttttttctacatgagttctgggggttcaaactcgggttctcatgcttataaggcaagtgcttcaccagctgagccatcaccccagccttagagcaataaatttttaaatattcttacattgagatggagactctgccaaggagctccaaaactcaagaccagaacttcgccttaaaagagtctaaagaatcaatttttttaaatagctaaaagcaaacagaagttatcactatgtcaaattaaaaaaaaaataaatgagtcttaaaacatgacgaagtcatcactgtgccaaagcacaagccacagtcatggccatgatggttgtgtggggatggacagatggggactcagtccttcctgatcaatctgctaaaagcctgttattataaaaaaaaaagtctgtcttttaacttttaaaaagacatgacaatcttcctctatgtctccagtattcctttaacctgactactgtaaaagtccatccatatccatgcctaacacctattacataaaaaagaaaattgtgcaaattgtattgattggtcaagccactttcccaaaggcctattgcgtttatagacagctgtcatggaccagaggcctaatggctcatgtgttcattctacttccaagaaaacagttgtttaagagtttaatttattgtatgctaggtctccaccagcacctatttagtgaaataggatagtagatattgcatgaacatttaagagttgactttaagttgtgcataaactacagtttcagtctgaacatggctttctacctccaaggtcccaagacacaacaaggctgggttgtgcataggaaaatgtctcccctccctcttcacaataacccagaataactactagcaaccaactacaacacagttccaattgtgtgggaacttcatcacataggtgaatttcatgctcacatcaggaagcctacagtaacacttcctcgtggcttctttcatgccaagaaagccagtgagcatcaaagggcataggagtcacacaaaagactgtgagaatagtgttctgaggttgaacttgaccctctcaaacctctgaactcatgccattttaagcaaaggcccctgcagagtcttggacacacaatgagcaatgacaatggtaacttgcactgtgttgctgaatgcagagggtgactgcagcctgctgcttccctgactggttcctgtgaccccacagtcatcaggaaagcagtaagcagtctcacgggctcttccaccctctgataaattaagtggttgcacactcaaaatgaaattgggggtttgtcatttgtttatttgggatcttttttagaatagggacctgctatgttaactcaggctacccttgaattattgacctacagtctcagcctcctaagtactgacatcacaggagtgcattccaccacacacagttcattaggagtttttaacaaaggtttgggtgtgaggcgggcagcaccagacctcagtagcaagaaggctggagcatgttgtgactctattctcctctcagactggaaaggctgcccctagactgggctcagaagtatagtgacaaatgcccaaaacaaatagcatagctattttcccagggaatctgccatcattcctgggattgtcaggcctctcttctatgggatgttagtaaaggagaaagaatcacatacacacacacacacacacacacacacacacacacacacacacagagcataatcctagtgaagattactatacccctaagtatccttacaagccagccactgtccttcacctttgaccaaccgtcacatgtgtccatgaccatatgtgagccagaggcctgaggaggccagaagatgccatcagataccctacagttggagttacagacagttgtgagctggcaggggaactgggaattgaacctaggtcctttaaaagggcagtcagtgttcttaaccactgagccatctgtctatgtccataaggtatatttttttactcccccttcacacaatgtaccagttgcatatttctgcacgtatgattatttatcagatgaccatcatgtatgttgaccccacaatgtgggaagtgggaagccgttgcccagttcagacaggttctgttgctgagccgtcctggaactcctgggttcatgacagtagctgggcctgtgggtccatactatcacaacctactcatgctgctagtttaatcaaagcatgacttactctgtaaactcctgcaagcagggcccttgtcccagctcatgtctacactcatgcttggcttaagaacctatacaaacaaatggaaggactccgttagattcctctctgcctggactctgggtcgagacacccagggcctgtcctcggaaagtgcttgtccagtgtgggtaacaaactgggaaacaaataattagaacacagcagtcggatgtgggagaggcagagacggtccccggtccactaagaggagtctgtctacagtgagggagaagtggcgtcaggcagcagaaccaagcgcgaaaacctggaagggcgcgaggcaggtgccattctgctgaagctccccagtaagcttgggtgatgaagcccacttttatagacagaaaaccctgattcggagatgggaatggacttgccagagatcacagcttgtaaatcttggcctcagaagtccactgccgtcctaggccgtctgactaccctgggccactttaccacaacaggcctctattgttctagaggctgcctggatctgcagctcacactgatggcttggcctctagtgaacaaagagcagcttgtttttctgactggtctggttgggtttgaggggtgacttggtttttgttttggtttttttgttgttttttttttttttttccttttaatcattctttagactcttctgccctctagtggttttgtagagtttaccacactggcaattttcctacatcaggttaaaatgctgatagatgattgctaggctatagtctaactccttccttataataataataataaaaagcacacacacacactaaaaacaaatgtctttaaaagcaaaataatccttagtctaaaagtacttttaaaaactacttgtcagaaaataactcacttcccttagcctccacatattaaacgacaaacaatctatccagttagaggaagatgacgactaaggaggagtttgagtgtgccaacccctattgtacacatagaggtcaaagtgcatgtgcaggggacgggatgtcaacacagatcccaaaaccttaggcacaggacagactataaaggagccctagacaaagccactgcttagctctgggcccctataacctgcccacctggctacagttttactgggtagggtccacatcttatccagccacagaatacgtgcttggctgtctcctgtgtgaaggctacaggcacatgggtaccagacttcgaccttggtctcaaagcaagtatttgagcaatggctacaaacagcagtaactgtgacaattgtgttttattcttcagagttctaacttcagatggctgcaaatgagaaatgggtgccctcctccccccccaccccgccaacgctgcagcagaagagctatgagcaacaaaagactacttgctgccaggaaagctggccagcactcaacgctcttcgtgaagatggtaggaaacggggatgaacgtgtactgagtggaaacagaaggcaagggagaaacttcatggggagctggatggcaatgtgtgtgttgcaaagaaaattcatcttagaatctaggagaccagactgagttcctcctgcgctccaaaccaccagtgtgatcttgagaagatcttgttgtcatgcaggatcccagtcccctccactgcagacagccactctcagtttctaactgggtgttgccctttggagataaaacatctcaaactgtttccgctagcttggacatggcaaaataaaatgacctctccaggtttgagaacaattgtgcttcttccaccagcaatgcctgccccttcttgaatatctctgatatcagagaacccaactgcaaagtaaactatacaacatttcaaaacatggtcattagaaaactatctgcaggtctagctaacttctctcacacactcggtacctgctagtcatcagcctaatctcggagtcctagtctcagggtcaaagagaatacagctaaagccttgttagtgtaaaggctttgcaagtggttcagggcgtttgtcagcttcctgggcacctggtgctcacagtcaccttcaagtcatcctcttccagttcaaggtttaggtctttcaccacccaagaactcacttctctcacgatctcgtgtgtgtgtgtgtgtgtgtgtgtgtgtgtgtgtgtgtgtgtgtgtgtgtgtgtgtgtgcagagcaattagagaaacaggtccagggtatagacactgaagcagactacttacattcaaatctgaacactccttgttagagctgacatgactttgaacaaatgatgttaccttggacaggaactcctacttccttctttctctcaaatttctcatcaaatttgtattaactgagttaataaactcaaaacacattaaaatagcaccaagcacaatgagagtgttcatcaaattatagctatcattaggattgctgtaataacagcttctcgaaatatagcaaggcaatcgcctctctcatccttggcattttatgtctattaatgacgctgtgggaatttcctgtttagtgtatttgaagtgtccatagtacaggaaaggaaactcaataaacttcacatccattaaactgactgctggctcagatttctaagtcattttcatctctctaactcacaaatccatttctttcatattgtacttagagggctaacccaagcttatattcaaattcatgctatttctttatcagaatcatgtccttcccactggctaagatggcttacaatttgttgtgatctcacacatttgacatcgctcccagtttcaaggcacctacaaattccacagccttgttctggccaatagctgagtcatgattagccaacaaagatgaataatttgaaggaaatagaaactccccagggaagtaacactccaaaaacaatgtctgatattctcagagggatcaaaaacattgcctccctaaaagaggatctgtgccctttaaacagagaaaacatggaggaaacaggccaagggttccagaaactgacctagggaagcagaggtgatgagttaagtgagaagaagttcatggctggagcaatgactcaacagttaagagtatttaatgctctttgggaagacccaaattcagcacctagtgcccattatccatggctccaggatcaaatgccctcctctgatctccatgggcaccaggtatatatgtggtacacatacataatctcaggttaaactctcatacaaataaaagtaaattattttttaattattattttcgaaagaagctagagctcttccagatgaaatagatccaaaagccagagccatggaaaagagagaaaaatatactgggaaacttaagattccatcagaggggttcagtatccaaacagaggtaaattcagagaggacacaggaaacacgtggctagaaaccaacccatagtcacctaaaaagaaagggaagaggcctccaaataagaagaaaaccatttcagactcgaaatgtcatttctatcagacacccttcaaaatagagggtaagtttgccaaaccttgcacatctttgtgaaatttcaaaatactgcagattaaagggtgtccttaagactttcacagaggggaaagaacatgtaaaactcaagaatcctacaattaagattcccattagttgtactggagactagaaggtaatagaacaatgcctctgagtttctaaaggaaaagtgaccttcaaatgcagaattctctacccagctaaactaccaactgacaagacagagtcctgggtctcttttgctagaaaacaagccatcgtaaagcttggtggcttttaaaaacaaattgtaatttctttacattccatgaatcagctaagtggccactagtctggtctggtttggcaaactttatagtcaagtcatcttgggctcaatggtgtaggatggcctcacgcatactccagaaggctattcttaagtgggaagtgggtggtcctgtgttgttacaatttgtctctgctccacttggtctcttgtttaccagcaaactaacctttctcccgtggtgtttggggcttccaaaagagaagtgaaacagtgctccccagtggataagcattttcaattactacttcttttttgtctaatgtgttgctactggccaaaatcaggcaatatagttaggaaccacaaaacaaaaaaggaagtaatagggctattttatgaacaaactacaagtaaaccaaaaacatttttagaatctattctcttgaaaataagcatcccattttcaatgttttccagaaggttctatagaaagtgccccaccaaaacaagacagcaaagtgtgggtgtgggaagacttaagatctggaatctagagaacagggaatccatcacaaagtagagctcccataaataaaatgtttcggagcaaacaagagatcactgctgtgtaatagcccagaaagcagcagttcaaactggagctggctggagtgagtcaatacagatttcccaaacaaggtcctccagtgaacaggaaagacattttggacatttggggataaacgattgtggttacattggtaagacataaatagaaactcaagcaaaccaacattaagacaatttcattaagcccagggaaaacaaagcattgcataagaaaggagaagtgtttgtatttgtctctattccaagcccaatcgttctggtttgcatttgccgctatgctttggaattagaatttcaaatcagtgagaaacaaactttgtttttaattattgttttcattcagtctgtcagaccttcctctctgcccagcagtaaatcctgtaacaccccaggtgaacaccccaactttcctattttcagtgactaagactcagactcaaactcttataaccccaggctcacactagattcaaaactcaccctctcactcttggtttctgtctgtgctcacacgatctatggctccagggacatgggacaaaaagaaaacacactttcattgcagcattacccttttcctccttctggggctctgatgctttaagggtagggataagaaagggagatgaagatacagatagacattagctatgtctttatctaactggagtcattgtaatctttttttccagccacctgtgactgcccacaaaggtgaggtgtgtgcccagtgtccaaagctgactcatgagctttgattatgactcatgagcatggtacctagagaaaacattagaatcctactcaacacatttgactaacgtaagaaatcggaccctgggtatacctcttcatatttctactacatatggcccatccctcttaacctcatgataacggagagtcctcatcctgtaagcagttctctaggtcaagcatcaaacaaaggttggagcctagtcacctccttcttgtagactcactgaacctagctggtgctctcatagggcttggtagagctgacctcccttctttggaccctgaagttccccctctctttcctctccctttctcagattcagggagctcaacaaacccagtgcctagggactaaaagactattcttcttacccagtgggtataccaagtctgcacaggcgactgactgactggggaatccctttgtttgatgtcatggaagcaaacgataccactgatatttatagaaaaccactggttggtcttctatgttcactgcaacctgagacacatagggtaaaacagagaatttccctgagaagctgctgtagaactgactgttttatgctttgtttcaaaaaacaaagcaaaacaaattctttttttttctctcattctttttctttctcattttgtccagattcactgaattcagaaacaatagcaccttcattatataaagaaaaagaaataagtgagattttaaaaggaggggactacaatagggaaaaaagagttagattataaaagtcgaaagactctaaagacctcaccaggaaactcttagacctgatgagcaatttcacaaagtggcaggccttaaaatcacttggaaatcaacttacctacacatcagtagtgaactagtcagaaagaaagaaagaaagaaagaaagaaagaaagaaagaaagaaagaaagaaaatgtctagacataatagctgggaataaacataaccaaggatgtaaaagacctctgtaatgaaaatattaaaatgcagggctacagagatgcttcagtacttaagaatgcatgctgttcttgcaaaggacccaggttcagttcccaacgcccatgtcaagtggctcacaacctcctgtaactctagctctgggggatccagtgacctctgtgtgtctgcaggcagctacactggtgtgcacattcccacacacaaagtaaaagccaagcggaggggtgcacatttttaatcccagtccttgggacacagaagcaggcaggactctgagccttcaaggccagcctggtctacacagtgagttccgggtcagccagaactagatagtaaaatcctgtctaaaaaaaaaatgttttaatagaaggtaaaataaaacatttatttttaaaacatctacctgcctttaatcccagcactcaggagacagaggcaggtagagctctggaagttctaatctacatagccattttcagggctatatgataagatcctgtccaaaaaaaatagaaagctggttgttagttttagctttttgtaaacttgatacaagctagagtcatttgagaagaaggaacctcaattgagaaaatgtccccaccaagtggacctgtaggcaagcctgtggtgcattttcttgattgcagattgatgtgggagggtccagaacactagggatggtgccaccccgggcaggtggtcctgggtgctatagacagagcaggctgagcaagccatgaggagcaagcaggtgagcagcgttcttcaatggcctctgcttcagtttttgtctccaggtgcctgccttcagtaccgccctgacttccctctgtgatggagtgtgacatggaagagagttgtaagctgaaataaaccctttcctccccaagtttcttttggtcgtgatgtttcatcacagcaaaagaaatcctaactcaggcatgtgccattcaaaaacaataaaaataataatctttgacagatgactgtcagaatttgtggcccaagtgcttcctagaagtagatgaagaattaggcaaaagtgtctgacttgtcaattgctaggactttttatttgtttcttcttcacaatctccaaagcacaatcccccagcacctctgagtactagtgccatgaaggaggaccagagagcaagaactgtcaccgctgtcctgtgagattccaaaactccatcaagtccacacccccatctataaatgaagaaagtgaaccttcatgagttctaatatggtgtccacctctaaatccttatgattttaagatttatgcaataactctaggtatttaagagccatgaaaatctgatttaaaaaaaaaaaaaactttatctcaacagaaaaccttctaactaaccaaaacttcccgccattcctcacccctaaaatacccatatcttcatccctggattctgtgactagtcactttatagggcaaaataggctagattatagacctaacaacaggggtttatcctgagttatctgggtgggtccaatctacttaactgaatcatcaaaagcaaaataatccctccagctgaaacaagaaaggctcagtagaggagaaatccaaacagatttaacaattagaaggtctcaaccacccttgctagaggggccaagtgatacaagcaaacctctaggagcagagactgaccccaagataaccagcctttgggaacctccgtcctacaactgcaaggaactgaatgggacctggatgagctattcaccctcagagactgtaagtcaccttcagcctggtgaggccacccagagcagggtgagcctggaccttctgactcactaaaaccatgcagcagcaacgtgttgtcttaagcatctgccagaaggaagacagaaagatgggaggaaggaaggaaggaaggaaggaaggaaggaaggaaggaaggaaggaaagaaggaaggaaggaagggttagtattcaggcatctgtcttggcctgtccttggggttctgacaggatacactcttagctgcagccactaagagcaccatctgtgcatattcactatgttcccttttaaaagggccctgctctctctctctctctctctctctctctctctctctctctctctctctctctctctctttctgcccctctttcctctctcctctctcttgctgctcctgtccccagaggccagcatcctcctcccctttcccctttttatgatccctttctctaataaaaatcctctgcttgaactctgttgaatggcatctttctcttgcactcattttttcttaaattagaacaggaagaaaggaaggaaggaaggaaggaaggaaggaaggaaggaaggaaggaaggaaggcagctatatgcctttctcatctgtttcaccctagattaatttttgacagccatcatttggaggatatgtgctcagtaggctctgcctgttccacttggaagtaaaggtgtacaactcagggctggggcaactactcatgggtaaatacacagtacacaaacaatgaagacctgagtctgaatccccagaactcaagtaaaagtcaggcgtgatatcacacgtctataatcccagtacccctacggtgggataggagatggagacatgggagatggaaacaggagtgtacctaggactgaaagctcatagttcagctaaccaggcacatgcagcaaacaagagagcctgtctcacacaagagagaaagtgggcaccaacactaagctgtcctctggtctccatactcacactcatactgaaaaccataaacaccccaatgcatcacatatatgacatatatgtcatatgcacataaatcacttttaagaggcacattgattgtatataaatagcttcctaggcattcttccccttttattatttattctgcaaacttgctgatactaacaccactctataattagtctttatattaggcaattataattaagttgtttaaggagaagagcataatgtttgcttttggttttaacatttcccagttctttgcctctttttctcttcactctatttggcgccttaataaaaaaatgaaaagtaagagagggagaggggtgagtgcttgtgtcatatgggcagcttccaggtttctgtcattaagaaactcagcttttcactattacttcctctgaccaaagagtcaggcctcagcaaatctatgacctgacattgctccctccccagagcaatgtttgttcctcacagatcaatgcctatgtcctggacatggcactaagtgccagcccatgtttttctaactttgggtcacgacccactggtgcattataaaactaatgcagtcagtcatgaccagaatgtttttaatgtgaactaaaattaaacgaaaaacatcacagcataccacacataataagtattgtttctaaaatgtttattgaagttatacatgccttcgtgtggatgttaagtagcaatggaaatgtttttattacagattatcatttttaaaaaattaaagcagatatttagggtaccttgtttctcatttcatcttcacttggcaagattgaactagactgaaaaacaggccccagactccgccaaatcacagacctgaggtccagacctcagtctgttgtctccagtctctgctcctgaaaaatcaaagatctgaggtccagacctcaatctgttgtctccagtctctgctctgagccattctttatttctccttcacagaactggcgaacaagagaccacattcaacactatctctgcatgttttgaaaaatactcccatacaagttaactacacattttctgacttatattcttgtctgcatggaccagctctgcttcccatcccatccaaaccacttcacacacaatcatgattaggacaaaagctagttggaaaaggttgatttttctgttatcttttggcttcaaacccttgacaggtggctgcggatgaagcctggttggtacattacccacctagcatacaccaagcaagccccgtgaccccgttatcatgcaaatggagcatgctggtgcacacctgtaatcctgggacctgggaggtagaatcaaaaggatgacaagttcagggtcatccttggctaatgtttgaggccagcctaggctataagagatgctagaccatgacaacccacagagggctttagctgaaactggatgctcagaaacaataccaaagtcaatacattttcccatcattgctcagtggtttccataaagttagtatttgtatcaactattagttgggcttttccatcactcaacatttcatctaccccaacactgatttcctcagaccctacactccccccagttcactgctccaacccagctggaaggtggctcagtgaggacttagttactacactagtgtcttccagtggtcagccagcagtgttaacagacccctgctcagctcaggtatacacacagcagtggaaacagagagctcaggtacacacacagcagtggaaacacagagctcaggtacacacacagcagtggaaacacagagctcaggtacacacacagcagtggaaacagagagctcaggtacatacacagcagtggaaacagagagctcaggtacacacacagcagtggaaacagagagctcaggtacacacagcagtggaaacagagagctcaggtacacacacagcagtggaaacagagagctcaggtacacacacagcagtggaaacagagagctcaggtacacacacagcagtggaaacagagagctcaggtacacacagcagtggaaacagagagctcaggtacacacacagcagtggaaacagagagctcaggtacacacagcagtggaaacagagagctcaggtacacacagcagtggaaacagagagctcaggtacacacagcagtggaaacagagaggccatggtgtaaaagcttgccactagatggttcattttacatacaaccttaggaacagcagagggttctctgctattcttctcaaatgtgtgtcaagtgtctgaaccctaatttgtttccagcagtccggcttctgaggacatcagggagcaaatcctacacataggatgaatcacaacatcatgctgtttcctcctcgtcacttctaccaccggtattagaaacattgctagaggactggggaggtgaatcatttagtaaagggtttaccttgtaaccacaaagacctgagtttgattctcagaacccatatttaaaaaaaataaatcaggcatggagacacaggttcataatcccagcactgggaaagtagaaacacggggagtcctggggcatcctggtcaaccaccctagcctcacttggcaagtttcaagtgagaccctggctcaaaaaagtaaaaaggcagatggtgccaaaggaatgacattgaagtctgccttctggcctgcacacgcacacacgcacgcacacttgcacatgagcatcatgcacgggcacacatgtgcctgcacacacaaaacaaacgataggaaaaagattttaaaggaaggtattatgttttccatggaattatttttcttcctgctcttttttctagaaatgggagacgtatcacaaagaaattctgaagacatattgaaattttccaatctcaactgacagctatgggattttttttctccaatagtaacactggatcttctcacaccacgtgtcatggtgtgactaagttttcaagtgattttgcaaatctgacaaacagatcaataaggatgaaaatatctggtccctctcactccaacccttgactcctgtcaccttgctttgctccctcacctaaaatccaactgtggcttgcaatccaggtgaggctacttcaccctgacagtgataactgctgaaaacctgcacatgaaaaaacttaaggcttctcacttaggaagctgagttccatgcatatttaaacaaaaggtgtgtttcttaattacaccatgtcaaatagggccttgattcctctgacccttccccaggggctacacagggcaagcaaagtccttttatgtaactgtgaagtctttgttcatacctaggaacaagcttagctacactgcacagcctcactttcttgtcagttgtgtccatcatcaaggacgccagagtcagctccctggagtccctcatctcctctactcgttcctcaagagtctcagaagtgtttttaaactgttcactttaacaaaccactcaaagcccccactagctcccttcttgagcagagaaaacacatcaataagccccaagagtgccacccaggatttttctggggctctgagttttcaatcaaaatcccttggtggctctgtgatgacccagtgttgccttccaattgaaagtttccatcattttgactactttggccacgtaggaaccaaccagctctgattggtattcaatttggagtgtaagtgtaaccaaactacttgggagcagccacacctccttggtaaaattctgaataacaactttccctgatacagatcaaaagaaaggactctgatacaaaccgaggggcagagatgctcagatggccaagtgcttggcacataagcatgaggacccacactcgatgcccagagcccacctgaaaagccaggtgcggcagggcacacctgcaattccagcagtcggggaagcagagacagtaaaaatgggccatccggtctagttgaatcaggttcagtgagaattcaggttcagtgagagaccctgcaaggttggtttaaatgagaaaccctgcttcaaaaattaaggaagagagcaagtgaggaggacacctgatgttaacctctgacctctacacacacacaaagcctaatgggatgtttctgggcatcagtgtctagaaccaccaatctcagaagaatgatggcttcagttaccacagccaggagatcccactgaccacacatttcagggaactatcacccccccccaaaaaaaaaaagaactggctgtactctgacctcacccctaagcagcctgggccatttcatctgttaaaaataccccagaactgtctggatttcggaaacagcagcatagttgtagccaacattgatgtcatagaagcagccaacaaatcaggcgacacggattccagtccagcaacccagctaactagaagagcctcctgcctcctaaggaactcggggacatgctcacaggccttaggggaaccgcccaacagctttgcagcaacagccatcaccctaccaactgtgcagctgcttttccttgtgatcacatgacatgtacatgtaaacaagcaatcacccctttcttaaagacaggaccccaagccttccccagcacccaaatcctcccagcaataacgcatgagggttgagtctcccagaaggcaactctacattccccattcttggcaacatggaaaagtttggctttcccactgatctgatcaccgctatgtgaataattaccctagataaccaccacaagcaagcttccctccataatggatgctcttccatccctagttttaatgtgattcaccttcttccaagtaaatattatttcccaatgcctggcaagtcccaactttgctcaaaatttatatattacttttccattatctcagggcagcaataataataacaatagcggttataacatcttccttctagaagaatcctggccacttcttacacttctctggtttagaattctctgatgggccttttttttttttccttcgttgtcctccttctccttagtggaaaatgttacttctaactgctggatttaatttaatttaatttaattacagcattttccacacatgcccacgggctcttggtaatagttgcatttttaataaatctaatatataataatgactttgtttttaattttccactgagagttggatcctgagctgaatacgaagctccagacaggggcgtctggttcactccataggattgggtttcagaaaactaacaggctgctaattgggaaatggctacactctcaccctctgtccccacacacctgcgtttaatgtcctcagccagcatcccatggggcatgaaatgaccagttgtttcagtcaaaaggatcaaggcagttgtacaggctccgggggctggaccctgatagtaaaaggaaggtgttgcatagttggtagccaggactgttacacaaagagactttgtgacaaaactccttggtcctgatctgtacccagtgaccactccaaactgtagcaaaaactctgagctgttattagagcccagccaggagctgggtcttagtggcagctctctttctttgtaaaggccattgtcaacattccttggcattccattttgcaaccatgtgtccatgtttgcttggcccaactgtatggtaaatgaactgtgttgttcaggactttttcctgtcttgcctgcgtcaggtgctcaacagagaactcggctctaccccatgtcctcaatgacacttagaactaatttacacatgtatcgggcaccaccctgagcaagttaccctgactacttcatgaagacttcccacacactcatatcctgaatgagtcaattggttttctgtgacaaaatccacttaaggtggcaagagtttgtttgggctcacagtccatcatggtcaggaggaatagccaaaagaacacgaggcagctggttacatggcattagcaattaggaaggagggggcacacaggaagagggcccaggctagcagacctggagacctgcctccagtgactcacttcctccaatacatatccccttgcccccccacccaggaggcccccccaaccttctagcacagcaccgccagctccagaccaaggattcatacctaggaacctatgagtgacttttccattcaaatcactacgctccccatcctatagatgagggaacctataggtgttcatatagatgagggaacctacaggtattcatatagatgaggaaaacctataggtgttcagcaactcagcaacttccttaagttctctctgttggtgaagggcagaaatgcccaaccatagtctgagctcttaaacattagtctgagctcaccagctaatacacacactgcccagcagtttcccccaaagcactcagaaaagttccacgaccacagtaaattaggcaccctctgggatcaaatgaaaccagtcctaagatgcctgagtagctcctaaaatctgcccatctgaggcccagcagctgtgattaaggcaagacaggtcagggccctcagaatgaaagtctaaagagagaaagtccctgctacagtctctgtatgaccgtcacagagcatgcctacttcaaaaggatgctgtcagggacctgctccattagggcacccagctgactcgtgcttgcacagaggccatgcaggcaaaagcttgcacaaagaccttctaagtcttcatggataccttatgactggcccagaagttgagggtaaaggaactttgccaggagttctatgaagccctttacccactcctggcaactaggtgactatcatgaggcagtgtcaccatggcttcctaggttctgataaggaataagacgttttgtctgccctgttcaaagcagggtgcagacaataaagccactgagtggcagttcagaatcaggtcctccacagggggctctctgctctctgtgtcttcattgttctttctagttgtataggccacagaccacagggaactaagtgcttggctagttttctttttgctatttgtgtaagggataaaaggtctgactctaaaagtggcttggtctgcttcaccaactgaattagccaagccctggccttacattttgccttgtgagcctttgacaaactctcctgtggagtcggtcacctactcagacagtacaataaaaatcagcccccaaaaatgccttaatatcatctatctcagtacaactgatggtgtaaaaggatacaaacaaaagtgtgtgtgtgtgtgtgtgtgtgtgtgtgtgagagagagagagagagagagaggagagagagagagagagagagagagagagagagagagagagagaaagagacagggaggcaaacagagacaaacacacagttcagctgacagtgtaaatggacacaaaaatgtgtatgtgtgtgagagagagagagaaagagtcagtcagacagacagacagacagacagacagacacacatacaggttatatcaaacaaacctggctgagcaggtagcttagttggcagaacacttgcatagcatgtatgaagccctgcatgtaatcaccagcatggcatagctatttatggtgatacacacccacaatcccaacgctatgagagcagaaaggaaagaatcagaagttctcagtcattcttggctgcacagaaagttcaaggctggcctggggtccaagaccctgccttcaaaggaaacagaaaaagcacccatgagagaactagaaaagttgctaacaggagtatttccctctcattaagcaagctgttggcaatttcagaaaataaatgcaaatgcattccatttaacaaaattaatatttattgcctataaacaaatccaacagaattctcggtggacacatatttccacatctgaatttaaaatgaagcttgaattctgcatttcaaaatcggtgggaatgcaaacgcggagatgtgtctgtggatggatccgtctactcatcagctccacacaagccaggacaagaaaggagcgcagggaatttccagctacacggaaggcttcagaaaggaccgttccagtcaccaatcacaccgattgccaatgtttgactactcgtggtcaaagaatacatggacaagggttaacactataccacaagctcattttagactaattttcatgactcaagaaacacaaaacaaagggaagtgtagttaataaataatgttgccacaaaatgccccagactttcatgaatcacacgagaagacagaacagaataacagccttaaggataaggggaggaaccagtgggaaatgcaattgtcaggggcaggtagggaccacgtgacaaaaggtcacacttctactctaatagtgttggaagagcctttccacttcgctaactagacccacagctataaatcccagctgtaattagttccatgaacatcatacacaaaggagaaataaaaaccgcttccttctgcaaaccgtaaatgtctttgaactgccctaatctcactgggatggacacgagcacacacacacacacacacacacaccacacacacacactcacacacacacacacacacacacacacacacacacactcacacacacacacacactcacacacacacactcacacacacacacacacacacacactcacacacacacacacacacacacacacacacactcacacacacacacacacacacacacacacacacactcacacacacacacacacacacacacatacacacacactcacatacacacacacacacactcacacacatactcattcacacacacacactcattcacacacacacacactcacacacatactcattcacacacacacacacacaaacacacacacatacacacacactcacatacacacacacacacacacacactcacacacatactcattcacacacacacacacacacacacacacacacacacacacagtttctgcaaaaacttcagccttcccggataggtgccgaagccaatttttttaaggatgatgtcatatatgaactagtcttcagtatatttttttaagtgtttttctacatgtctttcctcttaaaagcatagagtctcgtctcacattcatcagaaaggcttccaggaggggaagctgaatgtggaacaatggcaagaaggaggccgacagatgcaggtgacatagcagtagcctacacacacacacacacacacactcattcacacacacacacacacacacacacacacactcattcacacacacacactcacacacaccacacacacatatacacacacacactcattcacacacacacacactcattcacacacacacacatatacacacacactcattcacacacacacactcattcacacacatatacacacactcattcacacacaaacacatacacacactcacacacatactcattcacacacacaaacacatacacacacactcacacacgcacacacacaccacacacacacactcattcacacacacaaacacacacacacatacacacacactctcacacatacacacactcattcacacacacaaacacacacacacacacacacacacacacaccacacacacatactcacacacacacacaccacacagagaggtactctgacagccctttaacaaacacccccatgaagtctcacaagtcctgggtattcatttcattacttccacttagcaataaaaagatgaggtcttggtggagagatagctcagtggttcagggttcatctcactctttcagagggactagagttcaggtcccagcacccatgtggcaatcacaattgtctgtaactgcagttccagatgatctgacacctgccttgttgtgggcactgaactcacacatacaaacccacactcagacacacacatatatgcacataattagaagtaaattatcttctaaagaggccgaggcttaaatcatggagtcaatggtatgagatcaaaatgtttcctgcaattcacagaagaagggcaggaaaaaaatgtatgagtaacagatggagaggaggtctgtgtgatgctgtccacatctagacacaatctggctagcacacacatcaactcacagaagctgcggttacctgtacaacctacaaaagaggaagccagtcctctttcatcatgggtcagggaggggcccctggggccccatctcagtcagaggagccattgagcagttaatggttgccgaaaagggaagagtcatggcctagcagttaatagttgccagggcaggggttggaaggagacagacattatcttcagtggtgtagtcctggtaaaggtacccacagtcctgtaaggacccctgattcaccaggtggacaatagaaagcatgaaaccaagagaatttctcaaaacacagcaacaaaggtagcaatagtagcttgtccaaggtcatatgaaaacataagagatggccaagcaggagggggcatcttacaaaaaaagtttgaactttctcttaaaagactttttgttgctgtttcctgtaaatttaaacattcttttctaagggaaaagcttggtaagaatcagaaatcaattgaagcgtacaagtctcaggaagttcctgaaacttatgaaagtttcaaggctcctccccaaggttatgtatgtagtcacagtttttgaaaagagtcccactgacatggctgtgggcaaccccaataggaagctccatggatgcagccatcatgagtcatcatgcatgctgagttgagtttctcattgatgcagttgcctttgagtaacttctgctcctagaagttacccctgataaactcactatttactaagacagacctagatggaaatgtttctttggcctgttcactggtgactaacagaggtgaataagtgtttgtatctccctgggaaaagtcacaaaaataaaggagaatccacatataacagggggggaaaggtcagaagatattgaagacaaggcctgcatcaaacacatagccaggttcccagaactgctaatcattgtgtaaacctagagggtcaaattcaagccaagaaacaaagggacctaagctgaagaagtagtctagggttaggttgatcgcattaaaggtcttcaacctagttacactggggttagtggggcaatatattaacacactagagtgtaatactgtcttagtcactgttctatttctgtgaagagataccacagccaaggcaaatcttataaaaagaaatcatttatttgaggtatttgtagtgatatattatttattattcattaaagcttgactgaggattcagaaaagcagagtcatcctcaagctacagagatcaggaagtggtgatacacacctttaatcccagcagccagaagctagaaggtggtggtacacacacttgtactcctaggactcatgcttaagaggtagatggatctctctgagttcaaggccaccgagggatatatgtattgaatcagtctaaaaggctaacgcacacctttaatcccagcactggaagggtataaaagatagaagcaggaacttttgtagtcagtatgaggcattcattctccagccatgcttgaggagaggttacaatctgaggctttgtgggagcttgtggagacaggaccagcccattcagcttgaggtagaggtaagaagctagtgtccagctgctttgcttccctcatcttcagtcaagctttaagaaattataaataatatatcactacaggtattgttcacagttccagagggtgagtccattatggcagaaagcatgatgacaagcatagtactggagaagttgctgagagctatatcctgatccacagacggagagagacagacagatagatggggcctgacataagcttttgatatctcaaagcccattcacagtggcatacttccaacaaggccacaccttctcatccttctaatccattcaaagagttccactccctggtgactaagcattcagatgcatgcatttctgggggccacagccattcagcccaccatagatactatcttaattagggtctctgttactgagataaaacagtgtgaccaaaaacaacctggtgaggaaagggtttattttaatttacagttccacatcacagcccatcagtgagggaagtcagggcaggaactcaaacaagacaggaacctggagacagaagctgatgcagaagccatggtacagtacagttcaccatgcttttcatggcttgctgagacagctttcttatagcggccaggaccgccagcccaacgctgtcaccaccccagtgggcttctccctcccccattcatcattaatcaagaaaatgaaccacaagccaatctctcaatctctcaactgatgttcctcttctgaaatgactccagcccgtgtcaagatgacataaaactaacctgcacaaataaaaggatgattgtaaatacttagatgtgggcaatgcttttcaagagtgccatgcttatataaagatgaccatggtcagaccaactcattgctccagcaatgcctcatatgttggaattactctttttttaataattttatgtgcattagtgttttgcctgcactgtatgtctgtgtgaggatgtcgaatcccctggaactggagttacagacagttgtgaactgccatgtgggtgctgggaatgaaacccgggtactctggagcagcagccagcgttcttatgagctgatctctccagcctgagattattcttactaagagctgtagaccaaaacagaatcaagaatgataaaatataaaataataaataataaaatcaaaactattttagctacttgttaagtatcctatctcgcttctcaaaatataacagttcgctaagacatggaattggcggaggcagaggtggtcatcagtgcacgggagggatggctgcagaaggaaaagtcagctacaacgtgatggggcatcattcagccgtgaagagaaatgacatcctaccatctgtagcaaagtgatcggaactagaagcatgctaagcaaaacatcactacatgctcgctctcatgtgaaaactctgaattaaaaaaaaataaagttcacctaaaaaaaggtgagcagaagagggggcactggagaactgaaagggtacaggaaggctcagggaggtggcctggggtacacatgtagatagacatgtctggtgcatgcttgcaaatacccccgtgagtcgtttagctttcataattcatgaaccaataataacagtcataaatggaaactatacgatggggccagtgcgaggtctcagccaggaaaggtgcttgatgccaagcctggcagcctgagacccatatggcagaaggaaccaagtgacttcctctactggtatcctctgccccccaccctcactcattcatgccttgcacacatacaccacccacatgcatccacatgcgcacacacacacacaaatgagtgtaactttaaaatacatatggtatatgtaagatatacacaggcacacaaagtttaaatatatatcacatataatacacacacactgatttaatctaaaaagttccatctagttcacatttattacgtcgtatttcataggaactgatttaagtaataattttactccatggtaaaaaaaaaaaaaaaaaaaaaaaaaaaaaaaaaaaaaaaaaaaactattttgaagtgcatgaatccaaaaaatgtccaaccccagagccaacagaccattgttttacagcctgcagatgtcttaccaggagtccctgtggggagcttcctcctttctccgctttgaattggtccttgggcacttttaaacttccaaatcagaagtttccttttagtgaaggtcagccctggaaaatctctccttacccagcaaaacaagctcccttccaggattcctaaactgaagctaatttcctaagtttacaaaacgcccccatttcccattactgcttctaattgagggaaggccccttttcagccgcctaactgctcccagtaggacccatcaccactgagtgagaagcatgccaagagagtcactgctgcatgttccaggatgttcttattcctgccagcgaggcggtgggaggggtgggctcaccagcatcctcccctccctcacctgtgtttaatcattctcagggcataacagcagtaagtgatctgctgaggacccagaagcaagaggcttggaagccagcatgttagctgctgcaattggcttatgacttctcattggtgaaacggtcgcttccatcagggctccctctgccttcaggggtaggagccttatagaaggactccaagcagctgcagcatctgtgtattaaagaggtcagggattctccacagcactgccatcaccacaagactgttgtgatcttataaagtaacttatctaggctaatgcaacagttcagttgggtaaaggcactttctgccaagcctgaggatttgagagagagagagagaagcaactcctcggggacttctcttctctccatactcatactgtggtgttcaggcacacacacgagaaataaatgtgatttaaaaaaactttaaataataaaaatgtattcaagaccataaagctagaaagagcaaactatgaatctatagagttttctagtctcgaggaccctggcctcacatccagggttcttccacagaaatgaagtcagcaacttttggccaaagcctgagatatatggttacacaaagtacagttcttttttagtttatttttattttgtgtgtgggagtattttgcctgtgtgtgtgtgtgtgtgtgtatgtatgtatgtatgtatgtatgtatgtatgtatgtatgtgcatgacatgtatatacctatggaaaccaaaagagggcaccagatcccctggagcagaagttatagctgtcatgtggatgctaggatccaaacccagataatggggaagtccttctatgtatatgtttgtcttattgataaataaataaagcactgttggccaataaggaagcaagataggtggggctaggagtggaggaggattctggtaaatgtagtaaagaatggagtcaccatgtgattgccagagagaacataaggctggcgtcctccataagataagtccttataaaaatatatagattagtagttatggttgataattaggactgagctagcagataagaaatcctagtcataaatccaacaccccttcatgaaaaaggtcttggagaaattagggataacaggaacatacctcaacataataaaagcaatatacagcaagctgacagccaacatcaaattaaatggagagaaactctaaccaattcctctaaagtcagggacaagataaggctgtccactctctccatacctcttcaatattgtccttgaagttctagctagagcaataagacaacaaaaggagatcaagggaatacaaatcagaaaggaagaggtcaaactctcactatttgcagatgatatgatagtctacataagtgacccggaaaactctaccagggaactcctacagctgataaacacattcagcaaagtgcaggatacaagattaactcgaaaaaatctgtagccctactatatactgatgacacattggtggagaaaaaaatcagagaaacatcatcctttacaattgccacaaacaacataaaataccttggggcaacactaaccaaaaaagtgaaagacctgtaccataagaattttgagtctttaaagaaagaagataccagaaaaaggaaagatcccccatgctcttggataggtaggatcaatatagtaaaaatggcaatcttgccaaaagcaatctacagattcaatgcaatccccatcaaaatcccagcacaattcttcacagaccttgaaagaacaattctcaactttatatggaaaaacaaaagacccaggatagccaaaacaaccctgtacaataaaggaacttctggaggcatcaccacccttgacttcaaaatctcttacagagctatagtcctgaaaacaacttggcacaaaaataggtaggtagaccaatggaatagagttgaaaaccttgatattaatccacacacctacgaacacttgatttttgacaaacaatccaaatttatatgatggaacaaagagaacatcttcaacaaatggtgctggcataactggatgtggacatgtagaagattgcaaatagatccaagcctatcaccatgcacaaaacttaagtcaaaatggatcaaagaactcaacataaatccagccacactgaacttaatagaagacaaagtgggaaataccctcgaattaatcggtacaggagaccgcttcctgaacattacaccagtagcacagacactgagatcaacaattgataaatggtacctcctgaaactgagaagcttctataaagcaaaggacacaatcaagacaaaatggcagcccacagactgggaaaagatattcaccaaccccacatctgacagaagactgatccccaaaatatacaaagaactcaagaagctagtctccaaaacaccaaacaacccaattaaaaagtggggttcagaactaaatagactattctcaatagaggaatctaaaatggctgaaagacacataagaaagtattcaacatccttagccatcagggaaaggcaaatcaaaacaactctgagataccattttactcctgtcaaaatggccaaaatcaaaaacaccagacagttcatgctggagaggatgtggagaaaggggaacactcctccactgctggtgtgagtgccaacttatacagccactttggaaatcagtatggcgactcttcaagaaaatgggaatccgtctaccacaagatccagcaattccactcttaggcatatacccaaaagaagcacattcatacaacaaggacatctgttcaacgatgttcatagcagcactatttgtaatagccagaaactggaaacagcctagatgcccctcaattgaagaatggatagagaaaatgtggtacatctacacaacggagtactactcagtggaaaaaaacaatggaatcttgaaatttgcaggaaaatggatggatctagaagaaaccattctgagtgaggtaacccaatcacagaaagacaaacatggtatgtactaactcatatgtggattttagacatagagtaaaggattgccatcctacaatccacactgccagagaagctagtaaacaaggagaaccctaagagagacatacatggtcacctggagaaggggaaagggacaagatctcctgagcaaattgggagcacgggaagaggggggagggagctaggagaatgagaaggggagaagaggaggggtgcagaggacatgagggagcagaaaggttgagtcaggggaagaatagaagataacaagaatggagataccataatagagggagacattttaggtttacagagaaatcaggcactagggaaatgtctggagatctacaaagatgacaccaggtaacaatctaagcaacagaggagaggctaccttatatgccctcccctgataatgagattgatgactgacttatatgccacccaatagccctcatccagcagctggtggaagtaaaagccgacacccacaactaatcactaaactgaactgagaaggatgagcaaagagcaaaggtgtccagatcatgctggtgtaacccacagaaacaactgacctgaacatcggggaactcttgctccccagactgatagctgggatgccagcatggggctgatccagaccccaggaacatgggtttctgtgaggaaaccttggaaatctacgggacctcctgtggtagttcagtacttatccctagcataggtgtggactttgggaggctattccacatagagggatactccctgagccaagactcatgggggtggcccgaggccctatcccaaaggatatgatagactctgatgataccctatggaaggcctctccatccaggggaagcagaaaggatatgtgataggtagggttttagttggggggggggtggtaggggaggatgggagggaaagggaactgggattgtcatgtaaaacaatcttgtttctaattcaaattaaaaaaattaacacaaaaaaagaaatcctagttatttcttttacaatgccagcagcattgtaagtaatataagactctgtgtgttatttggggccctaacatggcggatgaattcaggaggctggcagaaagagttattgttacaaaatggtgcccaatgtgaggcacgaacccacaaccctgagattaagagtctcatggagtcagaactagattgactgcaggtagtttattaaagggacagtactcacacaagggccagtgaccaggtttacaccggagccagagtgacctgtagatgtctgctcagccaggcgggagagagaaaaagagagttccttgttcagcccgatctttttcattatagatcttcttaaaccacacaacagaatctattctaggctggtttgagatttcctctgccaatggaattaatccaaaactctcccctttaacctctggaaaatttttcagacaagggcaaaaggcagccacattcttcgccaacatattatgagactggtctctaggccacatactgacaagccagtaagcagtgttcttggcctctacttgcttccttaaacaacccaggaagcttcttcagctataaacacaccagctcttcccttgcagacagtgggactgtgaacacttttcatcagttttcagtaactgcttttagcatttatgcatgctcttgtaagttctttattccttctatatttataaactggcaatagaatttaaggaggaatattttcatctctccgatttattgatttgttcactcactcacattaatacattacattaatacaaactcataaatctcagtgggatttactggattatagctcaattaacactaaaatcagcctggatttggctacagggtgtgtattcaagctatctctagtatctattttaatagataaatttcaactccgtaacagaagtgttatgaatgggattgttgtgagtgggattgatgtgcaatgtcccctacaggcttctttgaacacttggtccccagctggtagagtggtgtatagagagcctatgaaacctttgggacatgaagcctgactcggtgtaagttataagggatagctggtttggttggctggttggttggcttgttggttggttggttggttggtcagtctgttggttggctgtttggttggttggttgattggttggctggttggttggttagcctgttatctggtttgttgtttggttggctagccggttggctggctggttggttggttggttggttggttggttggcctgttatctggttggctagttggttggttggcctgttaactgatttgttgttctgttagctgccctgttggttggttggttgactggttacctggttagttggtttgttggttccctggttggttggatacatggttggttgcttggttagttggttggcttgttagttgacagtactttgaagcagtaccatgcttttgaactagtaccattcagcctcagctcccaggtactagtattacagatctgcccaagcacacctagccagcctcaacagcaagttccaggatctgtaaaagaccttgtctccaaaaactaaggtggagagcactagaagacaaaagaaatcagcctctgccctccacatacatgtgcttggacacagatacacacacattcacacacacacattcattcactagcacacattcacatgcactcacacactaattcacacacacatacattcacacattcacaacactttaggaaacaacaattgtcatcctagaaaagatattcaattataaaaagaaccactctgggttgtgactgtttgataattaaatagctggaagtatttggagaagaagggcctctggtttccttcatactacattgttccaagtggggtgaccgaagtgcaaaccaagccgaggtgccacttttctatttcccagaaaccctcatgtcagaatccagcctttagaagaggaacaagcccccattagagctcccagaagtaggaattgaaaccagaaaatgaagcattcttactactcatgtgtttagtactggggctgcagtggaggctgagggggttatgagagccctcaattcccaagccactttccccacatcctgctgacagaggccggaacgcagacatgaaaacaggcctgatggagcagccccctctgtccggcttcccaagaggctgacactacaggtcacaagcaaacgaagagaaacctgggggtcagtctgtggttttaaagtcaggtcccctcctctcacagcctgtttcatttgcctccaagcaaggccctgacttggccactgtcaccaatggcgagtctcagaatccctgaggactccttccttgttgcatgtgtgttatggtttgaatgtaaaacgtcttccagagactctcatctgtaaatacttggaccccagcttatggtactgttttgtagggttctgagaccttaggagatggggcatagtaggaggggggtaaagtttaaagggcaaacattgggtccagttctctgctttacagtaggctaaggtgtgagcaagcagcctcacccaacttcttggcacagctgtgagccactccatcaccatccctctccaccctctaactgtggatccgagtaaatcgttcttccctgaagtagcttccttgggtacttacggtgacaggaagcaccagtggtacagctggttcctcacagtcagagctggcaacacagaaagaggtcacgtttgcctgttttttcctgatggtgactctgctagtgttcttgctcttccagaggacccgagtttggttcctaccacccatgtcaggtggctcactgctgcccttaactctaactctgagaaatccaagaccttcttctgagctctggaacacctgcattttaagaaattattgtacctaatatgtgtgtgtgtgcatgtgtaaaattccatagtttcttcataccatcaaaggttatctttttttttaagctttgtgttatttgaatgtatggttgattttacaacccttgggtctagaacattctgataagttctctacatttagaatattaatgcccgatagggcgaagacaaaaattgtccagtaggtggtgctgttctctctgaaactggactaaggaccctacagagtgactgcagctttcctaaaatgaacacttagctggagttgtggctctgtccgtagagcatttgcctgccatgcaggaagtcctgggctcatctcagaaccccacaaaactgggcatgtaggcacatgccagcaataccagcaccccagaggggagacaagacagtcagaagttcaaggtcatccttggctacttgtcaagtttaagggctagccgtggctacttgtcaagtttaaggttagccttggctacttgtcaagtttaaggttagccttggctacttgtcaagtttaaggctagccttggctacttttgagagtccctgtcttaaagcaaaccaacgaaagaatcagaaacatgtgggcttatctgttacgagtgagctcataaagaaacagagagaagagtctgttggaaaagcagatttggtagaaactgaggagtcagttgcggtggacagtgatttgttcaagagtgaaatgacttactccttgggattccattgtctacagcaaagtgctgagtctagaaatgactattgacatggtgtttacttagtaatttaggaataattctttttactctgttactttggtcttcacactctgcatgatatatgctgttacccctcccacaaagcaacggaggaggacacgttgccatattcatcagcttgcattactgtgacaaaatccccaagactcaattagaaagaggaaaagtttgttttagctcctaattttgcaagtttctgtctatgtccaatggcccacattgcttcggggcctccagcatggcaggatcacaggagcgatggtctcatggtcactcatggccacataggaggaatataaccacatgtcccctgtgatctgtagcaccctatcgcaccctacttcttaaagatctaacacctcccagtatcttcaagctgaggactgagtgcttatgcagagcctgtgtctacccacacacataattatccccatttcagggaagggaaaactgaggttaagtaacttgactacagtcctccagctggtgtaagtgctagagctaagatttaaagccaaggcgtacagccccagtgtgctctgaacacccacactaagatatctactgttctccagccctggtgaaaacaataatatcctggcacaacatgggtagttatgagagcaagactgaaaaagaggagactctcacctggcctctcccaggctgaccggaccttgaggttagcaagtccatcagcgaaacccttgtgtcacgtgactcatttgctgtctgactcaatccaggaatcccttttatggtttctctgagagctttattacaaactcaggaccaggagatcagccttgtctcctgaaatcgacctcttcctcatggctggttcaatgttcatcagaactaaagacaaggtcgaagactccctctgcttcctcctgagtgacagagaaaacacgagcctgactccctccacccccgcttcatccctcccccagccacccatttattctcacacatggcagctcttctttgaacagggcaccctctcaccccaccgactactctattgtttgcatatcttaaccaagacgtgtatagtctctgcctgtttcattgtctgtataacagaagtacccccttgcaggagaatcaaaaaaaaatgaattaatgtgagtaagacaattagaactattccaagtatacagtgaaagagtgataaattttgactctgaagggtggggacatagctcagccacagagcatccaccatgaatacaccaggccttgggttccctcaccagcaccacaaaaatgttccctttctatcacttaatgtccgatccgagtcactaaaaaaaaccttaggagtacagagaattcttttcattcacaactaaattttaaaataatgataggttagtagagctagattgatagatgataatcgacagacatagattgccaataggtgatagataatcgacagacatagattgccaataggtgatagataattgacagacatagattgccaataggtgatggataatagagacgatagctgtagacactgctgtgatggaaaaccattcaaccatatggcactatgagatcctgtcatgtgtggcagctcggatgcatctggaggacacagcttaagctgaagcaagccatgaacagaaagcaactgacacacgatctcactcacacgtgaaattggataaagttggtctcacagaatttagcagtgtagtcctggaatggggagcaaagggatttgaagaggttggccactgggcgtgttttacatagagaaaaaaaaatatgttctggttgctactgtatggtagggtgacaaaggtctacagtaatgtattctatgttttcaaagagcttaaagagaaggctttggatgtgcatgcaccacaaagaaaatagctgtttgtggtgatgggtctgcagttgcctttgattggattgcaacagatacatacaaacatcaaagcaccgctgtgagctgggaaggggctcggtggcccaagtccttgctgcacgtgcatgaggacccaaccagattcccagcgataaaagctatgcacgggagtgcacacctgtaaccccagagcttggagaggaagaacacggacaggctctggagactccttggccagtcagtctagccaaaagtggcaagttccaggctcagcgggaaacccagtctcaagatagagagtaaccgaggaagacatctgacagtgacctgtgaccttcacctgtgcattcatggcatatacttatacacagtacacgcaaaaaaaaaaaaaaacaattacactgtaccccatagttacctataactattgtgtgtggatcacaaatgtaaaacttttaaacagttaaaataaatcagagataatagctaaacctacgtgtattagtctggtttcaagactgcacagtttgaagatgacgactcagttattgcaatattcactctcctaagactccagttttgcaactgcacaaatatttggaagtttgtccgaaattttatgagaacaaaagatgaatttacctccatataacgttatttcaagtcattaagagactaacaactttgctaaaaataatcatctcacaaacatagaaatctctggatgggtttctttaagaaatgagaatgacaatcataggggctaaaaagagggatcttgggatgaaagtgcttttttacaagcacagagacctgcatttggtccccagagctcacagaaaggtgggagaagagaactgactgcacaagtgtgtcctctgacctacctatgtgtagcatgacatgtgcgaccatgcatgcacatcatggacacacaaatgcacaaatgtaaaactcacatttcctatgtttcaagagtaaatggtccgatttagtaggtacccagggaatgtagcttgacaaaagtctttgaaagtgtctgtaatagaattttaactaattttaaaaatctgttgaacaggaagatcaagtcaggggaagaatagaggagagcaagaaaagagataccatcatcgagggagccattataggtttaaagagaaatctggccttagggaaatgtccagagatctaccacaatgaccccaaactaacaatagtggaaaggctactttaaatgcccttctccaataataagattgatgactaccttatatgccatcctagagccttcatccagcagctgatggaagcagaagcagactcccacagttaaacaatgagctgaactcctggaatccagtcgcagagagggaggagtgatgatgagcaaaggggtcaagaccaggctggagaaacccacagaaacagttgacctcaacaagcaggagcttatggaccccagactgatagttgggaaaccagcataggactgttccagaccccctaagggaggatgtcagtttggagatctgggcaatctatggggcctctggtagtggatcagtatttatccctagtacaggagtggagtttgggagcccactccacatagaggaatgctctctcagcgtagacacacaggggagggtctaggccctgctccaaatgatattacagactttgaagattcccccccatggaaggcctcaccccctagggagcagaaaggggataggacaggggattattggggggcattcgaggaggggagggagaaaactgggactgacatgtaaaacaagcttgtttctaatttaaataaaaaaagaaaacatcagtaaataaattgcaaagtgaattcaaatgacccttcacctatatatgtatgtttccttgagctgctaatgtttatagaaaaacctattacatcttcattttacactcttttcagatgataagtaggtatatattccagtcaatgcaaaaataacccaaaatgcagctgcgggtgccatttctatgggaccccagagatatggggaagagcaggctatagactgaatgggaaattacccccacagataacactcccaccagcccagccacaatgccttccctgtcatggtggactatgtcctgtgaccataacccaaaataaacttttcttccttcttgttgtttgcaccgggtttttgaccacagtgatgaggaagtctaaacactaaaggtggactccaagggactgacacccaaggttacctctaacatctaagagtgtactcccccctcctgttcccctccctctctctctcccatgtcactataatcttccttataaatcaataacatgtttcaaaaatgtgagatataaaaacttctctttccttttgaaagtgagtagctggtagctgattggctagttggttagtttggaattttccacaattccaccaagaagtgatctgagcaagtgttaagataaacctttttatgtgggtgctaccaaagtttcagtgtttttatcctagacttcaacaaaaataagaacgccctcccttttcccaggagctgcaaccaggcatcctggtttcgtattgttctgtagtccttccacttgtccatgggttccctgaggaggtgtccaggcagccctggctcctctctgaggccatccacccaagcaagtgagagtccagcaccagtgatgggaaggggctcagccagcacttctcttatagccatcaaagagaaggaccagcacagagaagaccagcggaccctggttttctgtgcaggacaaatctctgtgcaaacggttacactcgcctagggtgagcactgaaaacacttcagagtcctcagatcaaaggaaaaccacaaaaacctcctctcctttatcctctccccaccctctatctgagaaccaaggttcactctcttctggagaatcactttcaggaaatgattgaagctgagcaaactgactctcaggctctgtctctggggcaattccaatccagcagtctttatgggctatttatcttcacgccagcatctcaccccagaggtcagtgagtctgactgttattaccctccatatttgctttggcagggctcagtggtaacatgaatttagttaaatataaccgaaatataagttacacacattgatgcagactgaatctacaagacacagtaaaagcttctaactaagattcagggagtcagggagaggacatggatatccctgtaatgttcacacagctatctctaccaccccctccagtagccagtcagtgatcctggaaatgtgtattgatcacttttggagtgaaatcacgtatttatctcatccagcaatttgattctgtcaaagaaacacttaagaccaaaaggttttgggcggggaggcagagagacggctccttcagcaaagcactcaccacacaaatatgaggatctgagtttggggtcccagcacccacataaaaagccagggtgctgcagcacagctgtcgtcccaacactgggggaggcagagacaggaggatccctgagctcatgagccagacagtgtggctggagtcttgagctccaggttcaatgacagactttgccttttaaaaaattaagatgcaaattgattgattaagacacccgacatcagcttctgttgcacacatgtgcatgcacacataaacacacacatggggtgggggtggggttatggggacacacacacacacacacacacagagagagagagagagagagagagagagagagagagagatggatagttgtgtttgccaccaagttcaacatcctgaattcaatccttgggacccacatggtcaaagaaggggaccaactcccacaaggtgtccctgaaccttccgatgccttcatgtgtgcttgtacatgtgcatatgcatgcaaacacacacacactcacacactcacatgcatgcacaaatatatatatatatatatatatatatatatatatatatatatatatatatgatttctatctgtgcactgacagaggttgaaaaatcccacaatttatcatcctaacccaggctggaactcctgtatagagccaaagttctgacaagcagaaaaatgggtgtttggggtggaaaatagttactctttgagctatgctgatatttcaaatatcaacacatttccatatataacaccaacaatccaaagtcttacatgaaggcttttaagagcaaggaaggagtaaaaggtttcccaaaacactaattacttaaccagaagattgccaacgaatgctgtcagttattttctttgatgtgaccttcccactgtttttcactttcgagaaaccctcacatctgcagccttacagaatggtgtacacctataaccctacacactcaggaggctgaggcaggactttaaattctaggccagcctgggctgtgtattgagcccaaagccaaaggctgcacgtcagaaagacagataccacgttttctctcatatacaagatggagttataacgtgaaagctgaagggggtcgactcgggatgagaaggggaaccaaaggaaggaggagggaggggaggagctcagcggggagcaaacataagcaaatgatgcgtgtatgaaaatgttctgtgaaactcgttttatgcactaacttaaaaattgatttaaagcacgtctcaaatgtcttaagtataactaatcacagctggcctgtcaattgttctctcagacaagctggtgtgtctgggctaactagttagatttctgccattcccttctacccagtctgccaggatgatgcttagtcttcagcagctcagtgagtgaggaataagctttctcacctggtggtgaggtgcttaattgatacggtttctggaagaaaacttgacaatgtgtatcaaagatgcttagataaacactggtcaaaaccattgagttatggggcaggagagacggctcaggggttaagagctctggttcctcttccaggggagccaccataatggctcacaaccatctgtaactcccctcctatggtatctgatgccctcttttggcctcggtggtcactgtgggcacacagtacacatacataacctccaaacaaacactcgttcacataaaataaaaataaataaaatatcaggaacaattttttaaaaaacttgacctcttaaccttggtggacgcctgtaaccctggagctgtgtgaggcagtgtggggagggaacagaacaatcaagggaccttgctggcctagctctaggatcagtgagggattctgactcaaaggaatatggtgaaccctgacagagcaagacaccagatatgccctcctctggcatccctgggagagcacacggggacaaaacagaccatgtgacttctaagtttcccctaggaaaccggcccttggacatcagtgttggtagcaacattgtttacagaagtgaagtctagaaatcatctagacaggaagcctctgtgagtcagcccagtaaacccctggtaaggcccttgtgcggctcatcattaaagttgccatggcaatgtattacaggcaatggcggctcatcattaaagttgccatggcaatgcattacaggctctgagtcaacccaacacactacaaggcaaggcgttttgtccttgattcttttttgacccacaggagttaagtaatgagttcctgaatttgcaaacatttgggtgttctcctgaagatgtcaaatttcatgacggtcaaaaataggatactctataagacatcaaacgtttttttttaaagatttatttctaatgtatacagtgttctgcctgcatgacagaagagggcaccagatctcattacagagggttgtgagccactatgtctttgctgggaattgaactcaggacctctggaagagtagccagtgctcttaacctctgagccgtctctctagcctcagacatcaaactttttcagtttaataaaatttacttcctttctaagtgtgaggtctccctcgatgagatttatgtgtgcttcagaataacataaatttggggctcagttgttttgttttggtttattgttgttgttattattgttttgtttttaaggcagatagcccagcctggccttccactcccaagtgctgaaattgcaaatgtaagccagcatctcatctcctgcaaggggtctgttttggaggcagaatgtcagaagagccatttgagtcacattagttggcagtgttgcttgtgtctgctggacacttgctgattgcttttcgggtctgtgtatcagttgcagagagagaattgctgaagcccaaactccagtggtggacctcacttcttcaggcttccgacacaagtcttaagtaccagtttcagccccaataacaaatgataaaacaaagagcatttctaaattccaagctattctccaaggctaaaaacaaatagaacaaaaagatcaactatctagaaaaatctctagtgtgggaggatagagtgttggttccttcagacaaagcccaaactgcagcgtctccattctgtctcttctaagcacatgttgctggcccatcgcagagggccaaagctaagtcgatcttgttgctcaaaaataaaaagtatgataactctactctaatttgggagtgagtctatattaaaattcatcaccaactatattaaatgcccatagtatgtgtaagttaatggcattaatgactgacaataaatgatgactaagaaacaaatattcttgctttgtgccagatctctcctcagacctataatggctccctctgatatggtatctctcatcctgctctcttctattctttccccaactcaatatttctgctcctccatgacctctccccctctcctcttctcctgctctcattctggcagctccctctcccctaccctcatgctcccaaatagctcaggagttcctgccccttcccattcctggagtccatgcatttatcccctagagtacttcatgtttcctaatttctttggtgaagaggattgtaggctggtaatcctttgctctatgtctaaaattcatatatgagtgagtacataccatgtttgtctttttgtgactgggttacctcgctcaagatggtttcttctagttccatccatttgcctgtgaatttcaagattccattgcttttttctgctgagtagttctccattgtataaatgtaccacattttctctatccattcttcagttgaggttgtctccaggttctggctattacaaacaatgctgctatgaacatagttgaacatatgtccttgttgtatgaatgtgtattctttgggtatatacccaagagaggaattgctggatcttgaggtagactgattgccatttttctgaggaaccgccatactgatttccagagtggtgttacaagtttgcactcccaccagcaatggaggagtgttcctttttctccacatcctctccagcatagattgtcattggtatttttgattttagccattctgacaggtgtgaggtggtatctcagagttgttttgagttgcatttctctgatggccaaagattttgagcactttcttaagtgtctttcagccatttcagattcctctgttgagaattctctatttagttctgcaccccactttttaatttcattgtttggtgttttagtggctagcttcttcaaatattatcttgtggggttttttgttttgtttttgtctttttgagatagtgtgttgcagtgtatctcaggctaacctagaattcgcacagttcctgttttataatgctaaggtcagaggcaagagccacctcagatgctcccaattatgataattgttacaatgcttccattataacaaaatgaagtggctaaaagaagagaaacaattttttaaatgtgtaagattttccaagatgagaattttgttttaattatgtatgtcagccttttcccggaatcttccactatcattttctttttgactaaacaaggtcagagattttacctggtgtaaggagggtccagggaagattattggtgaattgaatcatatgctaagacagtgagatttatgacgttaaccctgttcaagacaaagtctcccagcccagcctctagagacacaatctctccgcttactggtcaactaagatatgtccaccaccagaccctacctcaaactgtgaacccaaataaaccctgcctctcttaacacagagaacatgtacacagaccacacgcaaaaaataaatgtaacaggaatcatgacacacctgtgtattcccagtgacccagaagcagctccaggaggctcaatgagaactctgagttgaagtccagcctgggcaacactgttaagtctctcccgtctaaaaagctaagtaaatatgaaaacaaaacagaggtttggcttggttctttcatttgttttatgtctatgaatgtttttgcttacacagatatatgtgtgaacaatgtgtggacctggtgtgtgcctggtgtgcacagaagtcaaaagagggagtcagatcccttgggaactggagttacagatgtgagccaccaggtgagtactggagattgaacacaggtcctctgcaagagcaacaagtggtccaaacccctgagccatcttttcagccccaaacaggagttttgtacaaataccattgtgaccctttgctcacctctacccaggaaaagctaacactcatgtttaacccacatctacggggagggctttaaaacaggcaaacataaattttccctgaataagaaaccaggaaaaccaaaacagtctaaacttagcataccctgatgtcttccataaatacaaccagagcgcctcctggcacagcataagcctgtgcctttgccctgaatttgtgcagaaatagaggatgaggacttcatgttaatgagacatgtgccaatcttgtgaactgtttacagatccttcacagtcagactctgcccctcaagaggttcgtttctgagaaacacaatgaagacatccctaccattatgaaatgaaaacctgacgtgggtggagacccattgtcatgtaccaaaaacaaagatctctgtgaactcaagctcgtggctcccatcagcaccaacccctctccagccctgacctcctggccagttgctatggagatagttctgtggttaagagtgcttgctactcttcagaggacccacgttggttcccagcacccatttggtggctcacaacagccacatatgacttcagctccaggggatctgatgctcttttggcttccgcgggcaatttactaccgtgaacataccccaacatgcagtttcctaccatgaacataccccaacatgcaatttactaccatgaacataccccaacatgcaatttactaccgtgaacatacccccaacatgcaatttactaccatgaacataccccaacataaacataatgcatgtacacaactgtaaaataaatattgtgtaaaagcttttagatgccatattttgttgaagccagaaaactgatgtatggcaggagttctgcctccaccaaagcacatgccatttcaattcagaaacactgcccacgaatcttaagcgtgtgctgtgcactgacactattctccttgtcagaagtggtcccaatattatgtgtttcagccaagagtccccctgtgctggccttcacattccaggcaaggaaacaagccttcagcctttctctctccttcggggagccaagctctgacggaaagccctccacctgctctcaagagttactgcctccgggtctaattgcatccatcctgtcttgccaggaaagcaggccatttgaaatgttatgtatgaccacccagagagctgagaattagcgactgctgccagcttcaccctggactgacgtctacacgccactctttccgaagctcagggaaccatatggagaagggggtagaaagaaaaaaagccagaggatgggaggggcgctctggagcgctgtcttccggaaggattcggctgctgtattcacagactcacagcaggggtggtgaccgtcactggactggacccaccaactttctagcatggatggcgaggggttcacgaggtccctcccctgaggagctacaggcagttaatggttactggggggaggaaagatgttatgtccctcagtggtgctggcactgagcacccccgcccctggtgttgatataagcaacctaattcaatacagaggagcacaaaaagaaaagacacgaaagcagaacatggcattgatgggaaagggtccagacaaggtgcaagagaggagaatgggggagaacatgaccaaagttcatcctgttagcagtatgaagttgtgaaaaatttaaatattacaattgatgcttataaacccaagtgaatgtataattttgtggggtaaaaaaatgaataatgaccaccatgaagaattcagccattctaagtaaaagagcattccaagaccacagataacatcccaatataacagcttttattcttttattacagtaacttaaatgtcatataagtttactactttacgatcctctgaacccaaggacctcctccctctgccacacatgaacccattaaaccctctccacgtcactagaatgattagagtgctcacttcggcttctttcaccgcgtatttgccaagacacgatgactgttcatttattgctggtcactgagttcatttggggaggtggcctgaatggtgactctggggtgtcatatctaggagtctaggaatgagtggacccaggactagggtgaggcaagtagggcactggggtaaagaacagtttaaaagaagggggtcccagaaattaatcatactgaaattaatgcaaaaaatccatgataaaaggcacttcactaatatagtataaatattaaaagaattcagctttgcactttgatgagtcagtattcctcatctcatttgtcatcttgccctccctgggtggctcaatggtaccggaagttctcagagcctctgacacacaaatgtctgcaatggaagcaaaaatctccccaaggcatcagccaattgaactttgcaattaatggcctaacgttaagttgtctaccaagcacctccaggaagaaaggattttaaagggctggagagataacaagaggttccagggagggtcttcggggacagaaaagcaggacaattagacaaaagatgcttcagttttcactgtgtgcattctagagtcagagcagaagggggcgctgctgggacacgctgcaaggcttaggattcatttttcctttaactttcaaaactggctagtttctgcaacatccctaaaggaaaagacacaaatacagtcagtttgtttaggttttggcattagcttcctgaacggtgtgaaaactcacagaattcgagagaactttggcggacctctccttaggccacaagctgaataacgcacggctggctgtaattaaagtggaagatgcagctataaggctatcaagtttttatcactgaggctgtgtttacaagagagttccagggcagcagagctacacggggaaaccctgggggaggaaaatcaggaggaggtggggagcaggaggaaatggaggaggagggggagaagggagtagggggagggaggaggaggaggaggagaaggaggagaggaggaggaggaggaggaggaggagaggaggaggaggaggaggaggagaagaagaagaagaagaagaagaagaagaagaagaagaagaagaagaagaagaagaagaagaagaagaagaagaagaagaagaagaagaagaagaagaagaagaagaagagaaaagagaaagcaaacaacttttctggtgtaggagactaggcatgtgctcggccaccaagctacatcccataatttacgagttacagtatttcatctgattccaaattctcttaaatcgttaaaggtgcctgtttttagctgctatcacataggtcatgagggcttcattctgttctatggtgaggcagcatctatctctcccttcagcaacgggaagcagtgcctctggccatccaagtgatgagtacagcaaaaccactgccccacgacaccttgtatcttctagcagagtctccctctcatctcttacacgggtttgttatctctgtcctgtgtgaggtggtggtggatttttttttttaagctaaattcagtgcctgcttatacgataaaatatcaatcaatcacgtgattgcattgtattgttcatttatttcattttcatttctcctagtcttagcaaaaaatctagggtgaacaaaggacatataaaagacacctctgaaactaaaggatgcttttaaactttgatgatccaatggaaaaatagtgtcttcttgggagagagggaaaataattaaatctggatgagatgagaaacatccgggtcaggtcagagcaagaggaacgcaatcccaggctgtagactgggggaggaggagagccctgctgacccatcaaaatcctgtctaagctcttagacatggtgtgacttgggtgtgacacaaagcccatgttggaaatggcataagacagtggttctcaatctcccctatgctgtgaccctttaatacagcccctcgtgttgccgtgacaccccacctcaaaattttgttgctatttcatagctgtaattttgctactattaaaaatcaagatgaaaatacctgatattcaggatataaaatatgtgaccccaaaagggtcaggacccagaggctgagaaccactggtataggacacattgagggttctaattccagaggctggagctggggtctctgtctgtgttagaagaagccaactcacgtgcccaggctttctctttctttggtcatcataaaaaaacagaggcaaaagcacaggacatgccaggcttacaattaaaagttctgatatgcagaggatatttctagtggtgaagatacaattattttataaaatatcaacatatggaataaccccaataaattaaactccttaaaaattacattgccaaaagtcagaaaaatgactagaaatttcttagtggggagaatattatattaaaaagttggaaagttttaggtacttgggcaacttttgttttgctttgatttttaagacttcatcatctttcttacttgattcaactttgtttttcttactgcataatgaagctttccatagcaaaaagcactaagctaattgttaataatttatccagatatcatctgtctttgtttttatgccatgcactgatgaacccaagtctaggagaattcaagccttatgtagatatctgcttctctgagagtcagccttcaaaaccatggctctgcttagattaattcttccacagccctgtaaagtaggcacaggactttacctcacttgctaactcacctccaagtcaaacactgagccccacagtgtcctgtgtggaaaattcacaagacggcttcctgagaactttcccttaaactgctgtttcccagatcttttgtctcacatcttaagagtgtataaggctacatgtaaacaaaaattctaaccatctttagttaggggtttcaaaagctagtgtttattcctaaggaatctttgtggtttgtttccctatggtctgaacagtgctaaacccttgtaaatgtttaagtcattgtcttctggcattgtgttttaatgttattactgttgcaactaaaactagaatcctatcaggaagaggatcttattgacttataaaattatcaaataactattcagactgtattttggaagaaaagcaagagggaaaatacctaagaaacagaaatgttacaatgcaaccaatatgttctcagttcaaaaggctgttcagttgtcctcattgcaaagctgtttcatttcagtcgccttccagacaaaaccaagtgtgccccatgctccaacttggagacatgaagtgacaaaaccctgaaagccctcaaggtatttttaaaggtctgcatccacatccaactgtgtaaggtgtgcaaacccactacttccagatgcatgaaacgcataggcaatcacctgagaaggagacgtaccccgactgcacctgaccaagacagaaatcccgattaaggaagaaaagattgcaaggatcatgcactctttgctgagaaaacaagtgttcattaagacatccagtctgcactcatatggcaaacgaaagggtcgattactctaaaagagaaaaccagctcactgaagaagtttactggggctttggcaagcaaaagctgttcaagtttgaagccgattactgtatttactggctatacactgaagctgcaccccctaactacttagtgtccatgcaaccctgactaagcaaacggtctaagagatgcagtaagtttataagtgtcagcaggaaatttagaaattaaaaaaccgtcattcatctaatgttcctataagacattactgtggccaatattcgatttttttttagccactgaatcaaatatttagagttctcagtcctctttcaaataaaaaaagtagttatcaaattaccttagctttttaactgtggaaacaattgtaaataatgagctcaccactctctaatatattagctatctgcctcatatctatttgttattttgaaaattttaatgatggatgcacttgaattaaattatataatccaaacaatgtttttttttcagaaactacttaaaactggatagagtttcctacattcagagagagtaaaagagcttgacacagaatttcagtgtgtcacctggaggtctttgtactccttctggaatcaaataacatgagttattactccagcaggcaaagattccttatagccagttatctagctgattatctagctgacagtgaccaaaacagaaaaacaaacagttgcctaggtgataacacgcacaaagttcactggtggcaggggagcccttcgtgcatctccacttttcttctgcatccgatgtcggtttcccctgtgttccttcctctgcggggttacagcctaggtggatgccatggtgcccagacaacaccctctcagcactgacattggaattccaaacggaacacttagcagtttacttggtgttgtttctcccaaatccgttctaacctgttgggattccagataagaaaagaaatcaggtgtgctgcacacctggaatcccagcatgaggagactgaggcaggaggctaatttgttcaaggccagcctgggttacagaaagagactttctcaaaagatcaaaacaacgatagaaagaaatttacaaaatcgaagacaagaaaggaagcattttctcatccaagtcaaaaaatcagcaaacaggtcagaccaatttaacagatgtctccaggacactccacccaactggtatggagcacacattcctctccacatccatggaatcttcctaaaaaacatacagcaagggaaatctgaatgaatcaacaggctccataacttcttttatctaagcagaggacagtggtggaatacagctagaaactaacagcaagagaagtcacaggcactgaacagatgcttcaagactgagtaatacactctccaaggaacagtgggttgtctaagaaagcacagaagacatttttgtttgtttgtttttcaagacagggcttctatgtaacagccctgactgttctagaactcactttgtagaccaggttggtcttgaactcacagagatccacctgtctctgcctcccaagtgctgggattaaaggcgtgcaccaccacctggctggaagaaatttaaaatccctaaaatcaatgacaaattaaagcacaatggactagaatactttgaagtctgctatagtggttctaaagggacagtgtacagctatgggtacttattaaaaatgcagagtgatctcagataaataacttaatgacatacctcaagatcttagaaaaacaagatcaagccaaagcaaaaacagcaagtctcaaaaaataataaagatgaaggaaaaattaacaaaatgggtactgaaagaacaatacatgaactcaaaaaaaaatgttgtttcttgaacagataaacaaaactgataaatggctagccgaaccagccaaaagaaagaaaacaaagatccacatcaataaaatgaagaaatgaaaaggggaacattgcagaagattcccacaaatccaagatcattagggaataatttgataacaaatatgccaaaaaaaatcctgggaaatctagaagaaatagataaaaattcagagacctactaatattaaatcaagaagatgtaaataatttaaacagattcataacaagcaatggggttggagcagaaagagaaggaaaacctctccaccaaaagaagcccaggattatacaggttcactactaaattctaccaaaccttttaagaagagctaacactcctgaaactgttccacaaaataaaagggatgggttgttaccaagctcaattaatccagtattttttggataacagaactagacacagatacaacaacaaaaagggaaagtatgaatcaatttccatggtggatagagatgtaaaacatctcaataaaatgtttgcaaagcaaatttaactcagtgagagaacatttcccaagcccaagttagtttcatccagggattccaggttggttcagtgtatgcaaatcagtgatgtaatttaaccaggtagacttatgaacaggaatcacacaatggcctgaattgatgtagaaaaggccttcaacgaaattcttcttctctttgtggtaaaagcccccaaagaaattaggaatagaaggaacatattgatataatgaaaagctatgtggcaaacctatagctaacactatgctaaacaggaaaacttaaacattcctctaaaatcagaaatgacacaaggatgcacactattgctactcttgttcaaggtcatcctcagagtcttagtttgatcgataagatggaagaaggaaacaaaatagatatagataggaaagggatgggccaaattacccctcattgcagttgcaatggttctacaattaaaagaccctaaagatgcctatcaaatcttatacacacttacataaaaatatcaggacacaaaaatccatgtgcaaaagtcacaagtctttctatgcaccaacagtgaaagagaaatacaccaagaaagatgaaatgggggctatcccattcacaatagttgaaaaaatagacaaggaggtgaaagagttcacaatgagaagtttaagatactgaaaggagtaactgaagatgacactagaagacaggaagattccactcttaatgaattgacagaatagtgtaaaaatggttctattactgaaaagaatctatagattcagcacaatccttaccaaaattccaatgacatcctcctaacaatgacaaaaaaaccctaaaactcatattaaagcacaaaagactctgaacagccagagcaaacctaagtaagctgggtatcacagtatctgacctcaaatcgtactacagagacacagtaacaaaaatcacatggcactgccataaaaccagccgtgtagaccaaggaatagaagaatagaagactcagaaattaagccacacagctatagctgccaaactcttgacaaaagtgtcaaaaatatacattaacgaaaagacagcctcctcaagaaattgcactggaaactgggcattcatgtaggagaatgaagcagatctctctctctctcactctgcataaaaatcaactcaaatttggtcaaaaagcttataattaagactttgatgatgataataattatgataagctttgaaagtgctagaaaaaaaaaacatagagaagacaaggaactctgcaaagaactcgggggacatgggagtcttagatgatcctaagaattggtagccaagaaaccgtcatcacagtgaagacatgcctacggagtggaagaaaatctttgctaactagatatcaggcagaggactggtaccagaatatttgaagacctgaaaaatcaatcacactaaaaaagaaaaaaaaaaaggctgggcgttggtggcgcacgcctttaatcccagcactcaggaggcagaggcaggtggatctctgtgagttcgagaccagcctggtctacaagagctagttccaggataggctccaaagctacacagagaaaccctgtctcaaaaattaaataaataaataaataaataaataaataaataaataaaaataagaaaaaaagaaaagctccaatcaccccatcgataaataaactgaacagacagcacttaaatgaaaagatataaatctcttgtaaacagtttttaaagtgttcaacatctttatccatgtaagaaatacaaatcaacactgagttgagactctctctccctcaagtcagtactacctgcaagaaaacccacaactacagatgttagtgaggctgggggtggggaatggacaggtaaagcctccatggaaatcagtatggtgcttcctcaaaaaccaaaatttaaaccaccgtatgacccagctataccactgctggttagatacatattggtgacgttttattatagtgtcttagagcaatttgcaaacctggattagatcttttctattcttcctaaccatagggtcaaactcaacctggaacagtggtattcattttatagcaaccctaacaaagtcgttagaggggtgtggtcacagctatgactaacttcatcacagactggagccatgcttccttaaagataagactaggaagggatgcctaaagggccataaagattcctggtcagcttcctagagtctaccattcagttactactgtcttcaatgtcttctgcagcctggtaaaatcagactgctacagcctaaccccattccctctaaggaagtgctcctggaaaaggctgcttctcttgggagtccgctgtgcaaggaaacattatactggtttccttaacaatcatgggcatccatcccttgctttccctgactacataaagcccgcctgccaggggagtgattcaagggcaggattctgcttctccacagagcagtcacccagggaactgagcctttgaagaccagcctaagtctctcgagccaggatgactacagttctgttgagccatgaacagacgctatacacagagaaaggagctgctcagttcccagggaacacagacaaagaccctccttcttctcaaaagaatagatttaaaaaaaaaaatgctttgctagagccaaatctactgcccacagagtgaacacagtactgatgcttcagtggagaactttctggatcagcctatacatggctcatcatgtgctgggtgccatccctcgtaaatccctggggttctggaatcagcctgcctctgcgcaagtccttagtccaccacttcccaagttttcagtgcatcaccataggcaacgaacttatttctatgccttggtttccacatctataaaatgacagcaacagtagacctgctttttctagggttcttggggttaagtataaggtacccactatacactaagcactcaaccaacatgaacaattaccttttactctctggaacccaaaccatgtttctcaatcacatcctggggacagtttgcccatcatataagaatgattgtgctagttgtggtgacctgggccagtgtgcaaataccaaagaagataggacaggaggactgaggtcaggaccagtctgggctacagctgtaagaagaggaggaagaggaggaggaggaggaggagaaggaggaggaggaggaggaggagaagggaaggaggaggaggaggagaagagaagaagaagaagaagaagaagaagaagaagaagaagaagaagaagaagaagaagaagaagaagaagaagaagaagaagaaggtggtggtggccatcattacacagtcaccgccagcccctgctcactgaagacactccccacctggttctctagaactataaggtcccctgtgaaagccacttctgtgtggagtagccagtttctcactcccactggacttctcacatcagcgtgtgtcacacagcagcataaatattattttattgtagtgagagacctcgaacagtcttgccttttccacctttaactactgccagatgtgcagtctgcaaccttaagtactctcaggttgtacagtggtcaccaccatctgtctcccaaaatttcctgtgtcctccactaaaaattcacccccaacagggaataattccctctgcccttctcctagtcctgaccgccagcaagctatctccacttctgtgacccgatcgctctacagaccacgtctcagcaaagtcatatctgtgccccccccttttgcattttgggagttgaggaaacacaggtatacagcaggcacacagaaaaagacactctgcaaaatagaggggggactccgaaaacccagtctcttctgagggctaggcggttaaggtctctgtggaagttccctcccctaacttaaggtttgaagaaaggcaggagttgattggtccactgctgctgctgcggacctatcctcatctggccttgaacttgctgtgccagtccatcagtagagggcctactggtgggagaaaaatgtctacaaggcctttgttttaagatatcaggcttttgtctcaggtcaggagagtaaggaagaagcctgccatcttggaagtccgccacctttactatctagtcatggtcccatcttcctatctgtctcataggctctcattcctggtctcacaggtaaccctacccactgttaagtgtttgaggacaccaaccgttcttaacagcttcaagctgacaaacaggtgataggagggaggtgacaacagaggagtggcagtcagagtgcctcagggaggctcagtctaagaggacatgacaaaacccaacccatagagatgatccagaacataagatagccatgtggcgatagtgtgtatcttcggcacttgccacaccagggatggcatcttgatgaataggtagtccacagaggctgttgggtagggagagggatagggtaatagcctcaggttatgaggaattgagctgggctgccacaagccttgaagaattgtttaaccccagcctgatcattctgctccacctgtaaaaacaacatgcctggctagtgaaaacaactcaccctgctccctgtcaaaccacaaaaacagcagagccttcctgagctacctgagtatgcatctatgtcctcagttctgctgagtgtgctcaacctttatcccacaggaaagctagggtcctcgctgttccagtaattgatcttagcctattgaaattgagtttgcctcttctatgctccactgttcctacctgaggcataaaacccaggaccctttaaggatcctctgggcagaaagccctccttcccccctccccagggtcacttcttggagagtatagatgctctctaagctaaccctaaccctaaccctaaccctaaccctaaccctaacaggctaaacagctgccagctgagacctcttgtctttgtgatctctgcctctgtgagcagtgcaagtcccaatgatggaacctctattcttgggacttcattgacactctgtgtaaacacaaatgttccctctccatcctcctcagacctcttcctctcagacaccctgatctgcaggctgagaggcctatcgccatttggtcactgccatctaccactcaaattcttgtgctgcctgggtctgactctgaggggccctgagaagaccctggaagctcttggagcttttcactcctctgagtcacaaaggtctgggggctcctggaaccttccatgtttaacttagtgattcctctgagtcttacaaacacaggggtgccacctcctaatacttgggtccatcccggggtgtacctcaggcagcaggattacactctctgatagtcctgcctttcctttcaaatttggagtgaattttatgaagaaagctctaaatgacctctcccacaggattcttcctgacttatctccaagatatcttaagaagctgcttcttagtgagctccagcccaccaaactcattcaattatccacttgagtctggctccggtaccccctcaataatggccatcgctggtcccagatcagaactttggattttgacagaccaagacaactttctcagagaaaatggcaggtggcctgccgaccccggcctctctctgcaatgcctgctcctccctcacacccttcacatagcagaaatgaacatcatagaacaaaaacccggatcactctctgacaacccactccacttccaaaaccaattcacccagctaactcagatcctcacctgacatgacatatgttacatcctgacctcatctaccctcacccaagacaaaaaggtccatatctggaaggcagcctgggaccatgtgatgaactccatcaacaaaatgacaccttcacctcaggaggaggcagccccgttaagggacccaaattctaattaccagcacactggcactgggacagaaggcttacagttaattgtaacttctttagcttaggacatgcctactcaagagtcaacttcgacaaaccaaaagaggtcaccggaaacctgctcttttcttagcccatctcactgaggcaacaccaagacatttgtgccagaactctcctgagagcgctttgatactcatgtccatttcttgggtcaatctgacccagacactggtcaccagcaccaaagactagaaaagggaacccaaacttctcaaaatgatcttctagacttggcctttaaggtttccaacaacagagtggatggggtcaaaaaggaaaaaaggaagagattagattgggaaagggatgggagagactgctatgccagcttccacctcctgaaaaccactctcaacaggtcccagtccacctcacacctgctgtccaaggaggtggagccaacccccaactccctgccagtgaatggtcacagctcatgggaaatatgggtttggctgtatttattggggtagccttggcattccctggagtatactaaggagtgtgacagtaaggggtgagccaaggagctgggcagcacaagtggaggtcatggatgactctgcttttgcctaagtgagtttctctgttgtcactgggaatcctgctgttctggggctacccagcctcaccctagctgagagcacctgccaggctgggatggggcagggacagatgaggggactgtccaggtgactgccgcttcagtatgggctgttggttatgttctgttcttataagggacttgctttgtttttccttcccatcttagttactgtcctgtaactgtcacagaatatccaactgaagaaactccctgccctcgctttcaatacaatcaaacaagaaattgggctaaggagtggcctaacccacagccaccctctactacgtgtcccagctgtggataacggggccgttggaagatggattatctgttgggtcacactggtgtcccctacacatactcgtattgatcagcctctgtcaatgccttggtccaattagggggtctgagttcttggctcccaactcaacagaattcagggttaacagtatggtggctggtaggaagatttcttccatactagaccacaggggcctctttcttcttactcacagaatggtatggaccaaccaaatttactaatttaacaaaaccgaagtctcaggcattccacaactttggactgggattatatatcaagcaaaaggccccctccaaagtttatgattgtctctaggagcaaaaatcacttgcattcctgtgagcacaaacaagctagacccctgggcacctcatagcatggactcatccctgggttgggataccatggcagtgatagtcaccccttctttaatcccaacacccctctataaaatgttacagcttgcaagttccagatacagcatggctgtcccagagctggggaaggggttgtttgagggccagccagatgacatgtaagggttaaacatgcccagcgtggcacaatgcaaccaggaagatatgtcagggagggatgtttactttcctataattctttctgtgcaccttgtgacttctttatatcatgtaataataaatggtcaactaaccaggaagattaaatattataaaatacatatttacctgacatcactcaacctaaacatacatagagataaaattaacaggacagacagaaaaacaatggcagtgggaaacctcagtttcaatgaacaaaacattccaccagaaaaataacaaagaagaagcgatcctaagaaagagtatggccgggctggaaagatggttcagtggttaagagtactggctgctcttgcagaggtcctgagtttaattcccagaaaccatatggtggctcacaatcatctgtaatgagttctggtgccctcttctggcctgcaggcatgtatacataataattaaataaatcttaaaaaaaaaaaagaaagaaagaaagaaaaaagagtgtgggaagaatagttctaagagacaaatacagaacaaatttaagaaaactaaaagagcaacttgtctttcccacattggagtgaagcaaaaaaaaaaaaaaatagcagaaggaattctgggaaattcaaaaatatgtggatattcagcaatctttctgaataagcaatgggtcaaaaacctccagagtgaaactggaaagtatcttcaaacaaatgaaaacacaacactgcagagctgactggatgtagcaaaagcaacatgaagaagaaagcataaagcaaccaaaacctatgtcgtcagaggaggctgccaaatggaagcccgccccactcaggcaaccagagaaagagcaaatctgaaatcggcaggaggaacaacaacaacaatagtagtagtaataggaagaagaagaagaagaagaagaagaagaagaagaagaagaagaagaagaagaagaagaaacaaaaccaaacgagggaccaggaaacagtagaactgggatttttggaaaagaaaaacaaaattgatgaacttttgtctagatgtaaaacagaagaccaaagaaaaacaaattcccccataatttaaaaggaacatagggagctgcaagataaaaacctaaaaagatacattccctgagaacttgggttctcagcaagagcaatgagtgcatgttcttaaccaccgagtcatccagcccgctgccccatttccccaagcgcaaatcagaagtaataaggccaggtgttagtgttgcacacctttaatcgcagcactggggaggggggggcagaggcaggcggatctctggagttcgagaccagcctggtctacaaagcaagttccaggacagcctccaaagccacagagaaaccctgtctcaaaaaaaccaaaaaagaaaagaaaaaagaagtaataagatgtggcccactgacatgaattacctcagactgaagaacctgttctgatgcaaaaaccctgtgaagtgaacaatcttggtgggtgggacggggtggggggtgctactgtttacaatgcaaaacgatgatgcaagtatctactgagtcagggattactgacttctaacttgggaactattcttaaaagaaacactttggaggagctagagagattgttccttgattcggaccaattgccgcctttgcagaggtcccagtatccaacctcctctctggcttcacaggcacacactcacatagaaacaacagaaacgtcaataaaataggcttttttaaaaaagaaagacattgatgctcaggttatactctggtttgtattcttcaattaagttacagatttgggggccaaattctagggcgtgggactagggcatcagttgagatgcccccaagagccttctgagactttaaagaaaattaacatgagaggccaggttagaggcgttcagttatgccttgcaaggaaatctgaggtctctgggtagtcaaagcaaaacctttaaccccaaatacataattcacagacatgattctcagaaacaaacaaaggcttccttaaatcaacactcagaacaagttcaaacatctgataaagtcttaggctaaaagcacagcgttttgttgacttgtcccatgtaaaatttcacctggcaataaaattgacaaggaagaagtcaaagtatttttgaaaatttggaaagcagagagaacacttgttcattttaaggaaaaaaatcattgagctcttaaatatatgtcatatgtttctgtatgtgcgtgcgtgcacatatgctttcaaagaattgaccagttcagatacttagcggttgtctgggcaattctgcttgtttcctggttttgctatgtaacacgtgtattttctgagcagtactcatttgtctgcctcagtttcctcaactgaagctgggggagggggtaacagtatcaatttcataagcacagtgaccactaacattttcataatgctcttgggtcattaaactgtcaacactgggactggagagatggctcaagggttagagcattactgctcatttggaggaccagggttcagctcacagcacccacacggcagctcacaaacacctacaacaccagttccaggaaatctgtctccctcttctagcctctaggtgctcctgcacagttgtggtacacagacataggtacacagatacacacacacacacacacacacacacacacacacacacaataaataattctaagcaaaatgtttaaattaccaatgttattatatgcatccaaaagaagcagagaagcactccttctaaggccggctgaaacagaatttcagagaagaggccaggatatgagaccctccagagggatcctaacatccagccagcagctgaaacaatgtgaccacacacagcatctgcacacaaggaaccagaaagaaacagcctctcagcccagaaatctcacccatttcatacaggctgcagcatttagatgaattaagcaagccacagcggccagagagacagcgcaagtaggcaaacccatggatgcttggaagagggtttgtgggaagggagagcagaggacccttcctactgactcaagatggaagacggttgtgctagaaactaagtatggaaagaaagggtacagagtgttcatatgaattcgaactgtgagctgcaggcagttgaagaactctcactagcatgaccagagtttgtgaaggtgaccatggaaactttgaaatagagagagacaagcagtggtgttccctcagcgactcctgtctaacacctgtctcctgttcatctctctcccttttaaatttttaaaagattctgctacacctccatttattttttacgtttatttatttatgggagggaatacgcaggttgccacagcatgtgtgagggcatcagaggacagcttgcaggagtcattcagttctctctttccaccattgtgagttcggccatcaggccgcaggcaggcgatttatccagagtcatctcgttagcccttcgatgtcttttagttttgccataatcgtggtaacttgcactgtccaagtggatgacccatcccgtagcccctgctctagttctcgggttccagtgacctcctccattccactgcagccacccaccctttcaccaggaactctgtcaccccaggacccaccctttcaccaggaactctgtcacctccacagtcttaaactttgatttcctccttgtcttccctcgcccccacatgtgccctccagccactttaactcacccctccctgctggccccacccactccctcatgcttctgagaaactcagattttcgacactcctccggcctcacctggctgtacctcctgactggaattttgtccacttggtggtgaaacagagacccttagatggggtctctcaatccatgtttcctcagccaccgactcacctgcccgtttactgctgctactcatttctctggtccaagctgcttctcctactgagcaaattgatgcttattcccatttttcacagcagggaaactgccataaagcagcagtcactacaactaacctgtcactggaagttgaatctgtctgcttctgctcagccaggctcagccagagataagggaagttaggaagaaaccagaaagccctagtttagttctcagcttcttctaagctttgagaaacaaacattagtgaggcaccctgggtgcttataaccaagagtttgcattgctttagaggaaggttgctggtggtctctgtctcttggttccccagtgacagagtgacaaggaacctggctactgacaactttcaaattctttatatggtgtcctagttagccatcgtcgtcaagatgacccagcctggagtcacctaaggaatgtctatattgaggaatgggttacatcagagttggcctgtgggcatgtcgtgggcgtggggagtggggggtagcctagttgttgattgatgggggaaggctcagtccactcttggtggctgcactccctaggcagatagacctgggctatatgagcccgagagtgaggaccaagaagcatctccatggtttgcacttgaagctcctgtgttggccttcctcaatgatggactgtgacatgcaagatgaaataaacctttacttccctaaattgcctttaatctgggtatttatcacagctatagaaaagataccaggacatgtggtaacaggcagagcaggggctcaatgagtaacgtttactaaggaaacaattgagctttctggttaattacataggtgggatgaaggaaagggggtcactggcccaaatgccacattcacaccctttgtttccccagagctaccaaagctcatttgaatttcccacttactcagaaaaccttctaaatttagtaggattaaagggacattactggagtcaacaattgcattagggttcaggattaaggcattttagctaccttagttagccggatgatggacaccatagcaacttgccacaatcatctgtagtgtttgataaattggtgctctccatctatttaagcagaatcagcagaaaactagggaagcttgggacttgattcaattttttctttctaatagattttagaacacttattcacatacatatttgttgttcaaagtggtagatttcagaatggcactctatcattcactctgcctgtttttcatggcttgagtgcatgttcgagggcatgtacaaacgtgaacacacacacacagagagagagagaaagagagagagagagagagagagagagaaagagagagagagagagagatttttcttttctaaatccactaaataatatcctgtgtaccatttgttctacctgtccacaaattggcatgttctctgacttgaatcagttctcaagtgtttggcccttgtttttctcagttatacttcctttcagaatcaaatgcaaactttaattaatctctgcagagtaaacacaagcacatgtcacatgcacagagccagggacccctaagaacacttatgagcactcctttaaaggaagtgtgtctactccagtttttttttttacatgttgtaaacacacacacacacacacacacacacacacacacacacaactaaaagtgcactgatgggatttttgcacctaatattggtaaacaccagtaatagtcaaactgttccaataatggagagacccaggaagatagtatacaatgttgtgagagaccccttggctcttcatactacactttttacaggatttacaaagatgaatgaggttcattctgtgtttgtcaaacaagtcaagagatttaagcaaagacattatcttctggtagccaaagagactcccactgcctcagaaccagctcctgcagcacattcaagttaagctttacagagaagccaagaaaaggattatacaacttggaaggaaaactaggcgtctgcatagtgggtaacagggatacttatgtgccctgacacttctcagtgctcaaaacatgcacactaccttccatgacaagccccatcctaatgtgtaattatatgtgtttattgataagaaacttgagtcctgattgtgttcacgtatagccaaggccacatgacagtcacaagtgggaggacatattggcacatgaggagccagctttgtccccagcatctctgacccacaatgcaaaagaaataaaggcaaaggtggaatgacctttataacctggcaacatattcacacacaaggaggctgtaaaaagccctttcgattagcattatgaaatttcatcttcacatactgtgccaatgtatgtggctctttccaaaattcctcgcatatccatccttttctttcaaatgcaattgcccttgtgtttataatgcaagtttaatcatttgcagagaatgaaacggctctatctttaccagacctccttgcaatcacttgcgtagtcaacagccattggtattattccttataggataatgggttcgaagttataaagtctggaaatattttactagaattctgctataggcatttcttattttgaatctcagttgtctccacccaccgccacatcttgcaggggaagaagttttatgacagcccacaaagtgagcaagccagttccgaagcacacccagatgcaggcaacaaacctcacttctctataccacttcctgctcggtcagtgaaacacaaccaccttcctctcagcccagctccactcatgcaaaatgtccccttcctgactgtgaccacccagaactgcaggagggaggccagcagcaatgaggctgcccatgtgttggtcagtggaggagaacaggaaagagaaacctttctcgatatagagtccgatcttagatggcaatggctatgagaggaggcagatgtagaccttcaatggcaatggctctgagacagaagagtgcaggagcaggagcttgtatgcataggtgtgtgtatgtgggaatctgtgtgtgtgcaggtgtgtatacacagtcgtgggaggccagaggtcagccttgggagtcaattttgctcttcttcatttactgtttttaagatgggctctgatacgtaaccttggttggcctggaactcactaactagaccatactggtctcaaactcagagatcttcctgcttctgtctccaagtgctgggattaatagggtgcagcaccatcttattttttgagacaggatctctctctgaatgtagagaagttattgattcagttaggctggcttgctgattcatcaaggcctagaagtactccatctctcccctcagtgttgggattacaggcctgtttaggagagctctgaggctacaaaccatgtgctcatgcttatgtgactggcactttactgactgtgctatatccccatattttatgtgtatgagtgtttgtgtgtacgtttgtgtaccatgtgcatgtctgtatccagaatagggcttcagatcccctggatctaaagttacaggtgtttgtgagccaccatgtgtgtgaaaccaaactcagggtctctgtaggaacagcaagtattcttaacactgagcccactctccaggacctccccctccccaccatatgccaagggtttttattttattttatttcatttgtgtgtttactgagtgttttgcctgcatgcatgtctgtgcaccatgtgcaggcctggtgcctggggtcagaagatggcatcagatcccctggaactggagttacaaatggttatgagccaccatgtggttcctgagtccccctgaagagcagccgagccagctctccagccgagtgtgtgtttttatagagttctgtactgctgtgtgcacactgattctttcagtaatcctgaggttttacagacagtccacccacaagtcccccacccaagaaaaaaccaaaaccttgagaataacaagtgccactcccatgatgtggactgggatctgtacaggtactgtctctttttacacaaggagggtggtttagcggatgacacatatttctgaagtcaatctattaaattagtctttttttcctctggatttgtctttgggctgttgactggacctatgtgtctgtttctaaatgtttaaaactggtgtggaaagtgctcctacctcttacagctttgagaataaggtgaggtgatatgtgtaaagcagcatagacgtactcaatattaattaacacaatcaaaaccttaggggcagagggggcctggggagacggctcagtgcacaagcctgagagcctgaatatgattccaggtgtaggagtgggcatctgtaattccagtgctctcccctggagaagtaggaagccaagacagagggatcgcctgaacgttttgcaggccagctagcctggggtaagaacacagtggcaaagacaacagaaggtgagactcccaagagctgttcttacacacacacacacacacacacacacacacacacacacacttacttgtggtacttgccagcatgcacacagagtaagaatttgtaaaacatctttttgcaatcaagcttttcctatgtaagtaaatgtgttaaaagcaggagtttggacagtgacatggctcattgggtgaaggtgcctgccactaaggcaacatctgtgttcaatcacccagccctgcatggtagaaggaaataacgcctgcatgttgtcctctaactccacatgtacactgtggcacctttgcacccacacccatgcatacgtgcacgtaggacatttaaggtagcagggaattcccactgtcaacctctggcctctatttgtacacaagcagccacaggtggatccaccttctgtcaggaggcaagtgaggtccctaagaaatcttgagtgaggcaagcctataactccagtcctcaggaagcagagataagcagacccaagtccaagcccagcctgggaaccaacaaaatcctgtttttagtacaaaagacactcgtggtctccagaacagactgtaaaactcccagcacaaaggatctaggagaaacaaacagagagacgctacagggaatacagttatacgaacagaaccaaaattctcaccacaagccacagctgtacaaacagaggcccttgggacagagaaacacaaaatagttaaggagaaagagatcaagaaagtctgcatagaaatcactggatccctggaatggagggggaggctaagggcatagttccatagtagacttctgtccttggatgcccaaggtcctgggtccacttcttagctctgaaaacaaattatgccaggagtggttgtgagttcgaggccaacatgagctatttgagcagaccccatgggactacagagtgaaagacatactaaagaggcaaaacaaatctagggtttttaacttgttaatttaagagaggatgaaaatatgtgagcgtccctcatagaatgcacagtttttcctattccctcaaattttgatacgatgtggaattttatataaaattcctgtctgagcctgattttctctataagatggaactcccgcctgcctccttgtgtcagagtttgagatgaggatcccccacccctcccccacgtgctgactctcacataatccatttactcattctcaaaaatcaaacacagagacatgattccatataaatatcaattgaagcatcatgactattgaaaatgtcacctggaaatgcatgaagactagaagatcagccaaaataatcaccccctagggtcaccatcagctcttataatttcataaacaggctggtgcttgacaacgaggaagagagtcagaatgctgcacaccactaggagctgtttgagttttgattataaacacttctagaaacatcattaaaataacacaggttgacttgtagttgtaaaaatctagctgctgactctcatggaatatgtgtattggtcagctttctataatgtaactaagttcctgaggcatttaagtcttaacacggaaaggttggctcagtattctggaattttcagtaaagacggagtgaccgcatggctttgggtctttgataacagcagtactttacagtgggtgcgacacaaaacaaaacacacacctctaaagctagggactagagaggggaagaggacaggccctcccaagccacttcaagagtattcccacaaacctcgcgtgagacgttcctacttggggctcccaccacctctctgtaaggcccccgaagactgacctgtgaacacaggaactctgaagaattaaaaccaccttcaaacctcagcagaagcctgatggaatcagggnnnnnnnnnnnnnnnnnnnnnnnnnnnnnnnnnnnnnnnnnnnnnnnnnnnnnnnnnnnnnnnnnnnnnnnnnnnnnnnnnnnnnnnnnnnnnnnnnnnnnnnnnnnnnnnnnnnnnnnnnnnnnnnnnnnnnnnnnnnnnnnnnnnnnnnnnnnnnnnnnnnnnnnnnnnnnnnnnnnnnnnnnnnnnnnnnnnnnnnnnnnnnnnnnnnnnnnnnnnnnnnnnnnnnnnnnnnnnnnnnnnnnnnnnnnnnnnnnnnnnnnnnnnnnnnnnnnnnnnnnnnnnnnnnnnnnnnnnnnnnnnnnnnnnnnnnnnnnnnnnnnnnnnnnnnnnnnnnnnnnnnnnnnnnnnnnnnnnnnnnnnnnnnnnnnnnnnnnnnnnnnnnnnnnnnnnnnnnnnnnnnnnnnnnnnnnnnnnnnnnnnnnnnnnnnnnnnnnnnnnnnnnnnnnnnnnnnnnnnnnnnnnnnnnnnnnnnnnnnnnnnnnnnnnnnnnnnnnnnnnnnnnnnnnnnnnnnnnnnnnnnnnnnnnnnnnnnnnnnnnnnnnnnnnnnnnnnnnnnnnnnnnnnnnnnnnnnnnnnnnnnnnnnnnnnnnnnnnnnnnnnnnnnnnnnnnnnnnnnnnnnnnnnnnnnnnnnnnnnnnnnnnnnnnnnnnnnnnnnnnnnnnnnnnnnnnnnnnnnnnnnnnnnnnnnnnnnnnnnnnnnnnnnnnnnnnnnnnnnnnnnnnnnnnnnnnnnnnnnnnnnnnnnnnnnnnnnnnnnnnnnnnnnnnnnnnnnnnnnnnnnnnnnnnnnnnnnnnnnnntcccaacctagaaaattcccaagtgctgctgggaaagcaagcatgtgcactcactcccatgggggccaggtgtgaagaggggactagggggtaaatccattgttagcccaacagcaaatgctgatgcagttcctgtttctgctgttttctttttgatttagccaagagctgtcattttaactaggttttcaattaggtctacacagcaaacattatatttgtgtctactctgtggtacccacatcctataattagttcattattcacgtttttttttttatgctgttcattcataaaacagatattcttcccaagacactgaagtcgggcttctttctacaagttcctacttaaaacttaacagtggaggaagaggacttaaaaagtcttacttataaaatttgaactggggctggcagaatggctgtgatgataacggtgattgctgccatagctgacagtctaagttgcatgcctaaggaaccacacggtgggaagaactgattcgaagttgttctctgatttccacgagtgtaaacaggcacatgcgtgtacacacacatacacactcacagataaatttaataattttaactaaatttttcatttgaatttaaggaaaggtaaaatggaaactatctgatcaatattacatatccccctaaaataactaaaaacaaaagcataatgcagacaatagtaacaatagccaaagttgcctacacgcccggacggtgccagtattcgatttatgatgtcatcactccagctggaaaatgtccctaatttagtccctttcaagtattctataaacatgacctcttcaagtgccatgaacttcccctgggagtgtggcaggctgtagaggcacacacctgctatcccagcactcgggaggctgaggcaggaggattttaagttcatgaccaccatgggctacacagtaagaccttatctaaagacagacttgaggtatttactgttgactgagtgtcactatgagccacataagcttcagtcaccacagccttcagtgtgactccaccccagccttcagtgtgactccaccatggctcctgtcaggtgaaccagcactcgtggagtcccaaggacaagggtcagctaactccccctctctcactgctttttcttccctaagatggccttgcaaaggtctccaggcctgccgtatcttcagtctcctccatttctaatgtctaggtccctcctttccacgtcactccacaggggctatcatgcagtgtgcacattctagaatctaaagtctcccaagtatcaacaaattaatcttttataacttatgctgtatgaacttgcagttcaggacagagtggcaggtgaccaaacactaagagaagctttcaagaagagggaaaacgatatgtctgccccagaggctccctgtagcacacctcactcgccagagtcgagctaagttagcctgagatatcatctttccttagagaagagctcgctctgcattgttttaaagtcatggggttttgcttgtttcacagttcacagcacaagccctcttttatgacaaggcaattatgggttctaatgaacactgttttgataaggataattaataggctctcaaacttaaatactaattaccaacccaaggttctgcaaagtcatcctctttaaggtcccaagtttccggcctttgtcttctaacctcacatttccatttcacctttccctgaatcattcaaaaacatagctctcatctccaagggaataaaagaggcttattctggagccaaagagacaagtgaccacggccccagagcaggagatccaggtgtgctggctggctggttttatgtcaacttgacacaagctagagtcatttaggaagagagaacctcaaatgagaaaatgccccccaccagactggccggagagcaagcctaaggtgtattgttttgaatgatgattggtgtgggtggtgccacccctgggatggggaccatgggttttagaagcaaactgagcaagctatgaggagcaagccagtaagcagcacccttccatggcctctacatctgctcctgcttctaggttcctgtcctgacttccctccgtgatggacggtaacttggaagggtaagataaaataaactatttctccaccaagttccttctggtcatagtatttttattatagcaatagaaaccctaatacatctagttaccccaaataccatgttccagtgtgggaagagtttcatggagttttcagaggaacagaacaaagacagccatggttttaaggacagtggtggattaagcagacacctatgctacagtggagcaagagtctggtgtaggcctcaggtgagctgacaggcagtagaagctaggggtccatttgcacattccaacaaggatgttacctcatagtcacgaggatgttgcatgaaacaggtgagcaatagatggctattttaagggaataaagaaagttcaagccagtttggctctggacctgcaacattctagctcttcataattactgtagttttaatcagtcatccattggatgtccacacccacctacagataggcagcactaattggattcactgagatattaaaaaataaaataagaaaggattgaagtcaggaggaggacatgtgaggaggatatgcaggggagggggacccatgagagctggggaaggaatatggatggatatgataaagacaccttacgaatgtgtgttacattcttaaagaataaattcaaggaggagggggaggaaaggacaaaggagggagagagagaaggagggagggagggagggaggcagtcaggtagttctaatggaaactctgccatgttagtgatcagacacttgtcttcgaggaagctagttcaagtgtgccacctgggacatgaccctctgtgatgggctgtccccaccgctattgtgctagtgcattttaattaatgctcagtgtgtgttagatgtctccatgggttcggaagaggatgtctccagggccagggaagaggacagagggctctaacctgacatcctgttcccatcctggcccactgcaactgggctaagcaaatctctctcatcttttcttccttgacaaaaatgaaaacaagactgaagagatggctcagtgggtaagagcacttgttacgtaaacacgaggacagaacccatgtaaaggtccagtcttggctactcacactgtaatactcccgtgctgtgactggtagagacaggaggatccctgggattagctggccagcagcctagctccagattcagtgagagaccctgtctggaaggagtaagatggagagagacagagcaggacaccaatgctatactctggcatgtgcacacacacacacacacacacacatagagagagagagagagagagagagagagagagagagagagagagagagaaagagaaagagagagagagaccacatatacagatcaagtacctaggctgtagaaaagctgagtccctggaaattcctgctgtttgaattaaccagcctatgtttttttgttatggcaacctatagcaagcatgtacatcgatcagcaccatgattttgacctactgatgccaatgtcagacattcatcctccagactgtcaaaaaatatgtctgtcatctcatgcaggaatgtcaaatcaatatttttagtattattaagatgtaatctctgttctcaaaaacatgctatgtgtttgaggaggaaaaataatccagtggcctaggggtagtgtgaaatgggagatggcagctgtgtctgtgaactttgtctgagctcacataaatatcacatactcaaatttagaagcagacagagggaaaagtataaaggatactgtggttggcattaagcaaaaagtcacacatacataacaaccagaggcaagccagagtgtttaaaatccacatcatttcttacaggaggtaaacaggagagtggcaatttaatagaatggaatattatggaggtgtgaacaaaaacaagtcctgtcttgaaaagactcagaacacactgttaactgttttgagagtgaagctgaaaaccaaagcatgcgtgatgactgcattgagctgtttccctcggctgtctgcaattctctgaagggcgttgcattttgttgcattggcgttcagtaagaaacagaaatgttttaagaaaaggctttgaaaagaaaactaattaagtgggggaacgacagcaggagacggcaccagcctccaaaacagaacaaagggcactcttatcgaaccagcaacagggatgaagacatctgtttcaaatttgacggcttggaatggaggtgggtgtggcggcctgggcctgggccagtgcaaagagcagataggacatctactcccaacacgaggctgactcgagggagccccaaatatctcaccgatcattctttctgttagagggtggaacatgactgggaacataaaggggagcaccctatgcaggacagtgtcaaagacaaaataccagcacgatgcacgtgaggtagggagaggatggcccgcaccttgcagcctgcaccatgcgttatacaggtgtggacatcagggtccccaggtgttgagtctggcttctgacagctgtgtgtgcctccacggtgaggagaccagagttgactccatctgtcttctccgatctcaaacacccacaatggtgacagcaaaggaaggaaggttcaggcaacataacaagtgaggacaaggggaaatgtaaccataggactctgcgggtcttaggatagttaaagccctttggtttgggattttgcttgcatgcttgtttttggttttggaaccaggtctcactgtgtagcccaggctggcctgggactctccattgtcctgtctcagatttctaaatactggaattatggttattcagtaccatgcctggctttgaagttactttttaatagttccataggagacagaacagaagcatgcatttcatcgaagtcctaaaaactgagaggggggtgctggtgaggcagaagcccacagaagtgctcatcaaatgcacagcattgcccagctctgctctgccaggtgtgtgcagcatctcatttaactctccaagtgctcttttatctcactcttctgctacaaaagacgctgacatgccaaaatcacaagcttctaagaggtttttgagccaggatttgaaagctcatcacctgcctcattaaaatgaaccaacataagctggacatagtagcccccacctttctgtgagtttgaggccagcagtcctggtgcagtgggcataatcaatgtctgcccctcctcctgaggtcccaacagcaaaccaacaaagtgctggtgttattccaccagcacttctgctgggagactaatgagtcgcttccttgtagaacacgggtgaggggttacttacaggagtgcggtgctcccctgaaaaaggtcaagtagtctactcagaagagatgatggcattacccctttcccacagccacatagaaaaagccccctccccccagtccttccccacctatggcctctagctccttccccaagttccccgaggagacctcgtgaatggggcagaattgcattcagagtggctggatactcaggagcaggatccacagccctcccaccagatccttatgtgagggaagacaagcagtcaacaaacacagctgtgatgaagctaacccagcggaactcctgaagatggaggcagtttggttccaaaggtcatcctgtacagcagcctggtctacatagagagttacaggacagccagggacacataacaaggctctgtatggagagatacatgcatacatacatgcatatatacatacatatatacatacaatggatggatggatggatgggtgggtgggtgggtgggtggatggatggacagacagacagacagattatagatagacacatacatacatacatacatacatacatacatacatgcatacacagacagatgatagatgaataccattgcagatatttagggctgaaaacatgataaaaggaaaatcagagaaccactcttagatcatcagtaccatttaagaagtgaccctgtgctgagcatgatgagacacgcctttgatcccagcattagaggggcagaggcaggtggatctctgagtttgaggccagcctggtctacagagacttccaggacagacagggcttcacagagaaagcctgtcttgaaaaaacttaaaggaagaaaggaggaggaggaacgctgtgactgtcatgaggcaattcaagaagaacgttccgatataagcacatggaaacacaagaagaaccagagcccatgcagccacagaacacggacggtaacaggagtgcctactgcttccaactgagacttcagcctctcctgggtccctcctctccctttcaatccgacttaggaatgctcagtcgtagaaatggccccactggctggcagcacccaagccagagcaaagtctgctaccaagagccttggctcatatcatgtagcaggagcctgaaccctacagctctcctttgagtttgcctcttgccaagctacccagaaataagtgttggatgctagtccccacttgcttaaccctggaggtgactggctgaagagtcttgtcagagtgactgttcaaggtgccccatggtctggctgggaaggaagggcagctaggcttgagccctggtgtcccctggaagcccctcaccatgacatgtattttggtttcctaggaataagctcctctgaatgtctctggcttgtgatcaggtctgcaccgctccagggaattgaaactctaattgcagtccaggcgtgtaactcaacccctgcccgtaatcccagcacttggtgagcagagttaggaagatcagaaattcaaggtgatttggggctccatattgagtgtgaggtcagcctaggctatttgagatgatcagatgtctaataccggcctgtgctaaacttgttggctttgccactgtgagtagtgagttaaaaatgagaataattacatctgtgatttcatgtgctaacattagcattttaaagaggcccgatgctccacaagcaagctctcccaccctggccgttttcagtcacactctgacaaggaaggagcgatgtttttctcctttatacggaaggcataagtgaggtcttacactttttgtgtgttctctgctgcctactcccgatggtccaagcgctaacaggaaagcgctgggatataaacccggatggaatgaatgcccaagtcctctacttcacagcatatcctccagaacacgttaattgttgtaacaatattccttctacacagttgtctacaacccaagtccaatggccccatgagtccagtcaggtctctctacctaaatgtgctagtgtgtgggaattttttgtactaaaagcaaatccaacctcaagtattaaataagcatcactcctctccaaaaaaaaaaaaaaaaaaaaaatgtgttgctttctttctgaatgactttggggatcagaatatggccatgaagtcgaagccacccctctggaaggatcacctggggggtgggggcccagctcctgacagtgataagaggcttgctcgttatcatggccctccccagtctacactgaggccccactctgagtgttccctgcccccagctccggcctcctgtctggaaaggcacagtgaaagattcataatcccagacaattttactttttgtagagctgctgtgaggtttttgggttttaagtcaatgatcctacttctggcccctacacactgtggctttgcggtgaaaaaaaaaaaataaggaaaggaaagggcccctcttgcctcacaccagacaagatacggctctacttccactcacagggcgagtcaggacctgctcagactcttgagcaggagtgtgagggctgaagtctacagtccacagcagggccaaaagaacagctgacacagaggagaaagcccagaaaggaagcaatgtgggaaatgtagatttttattggatgtgtgtttgcctgcaagtatgcatggcaccatgtgtgtgtagtgcctgtgaaagaagaatgggtcagggctcctggcactggacttagaggaggagcttctaagcctccacgtgggtgctggcaacctgcaagagcaagtgcctttaattgccgaaccatctctcctggcctggtaaatgtcattggaaaggtgatgtgtctttttggcagacaggcagcaggttagtgtcatgcccactccccagtccccagtccatattaaactacacttctgaactagtgacgctgctgcatgccacagtgtccgtgtgtccacgtgtctctgtgtgatgctgacccactgacgggaaaggggggctcggcacctaggaaggaaagccagcgttaaagccgggtgagtgcatagtggaggtagagtgtctgtggcctctgggagcacctggagggcagtccttagtcactgtgaacacagcccagagtgccaggcaggtgcagggtgggttcatgtcaggcaagactccttggaagaatgtagacctctgtgtattcgagtacgggttcgagtgtatgtgtgtgtgtgtgcttgtttatatgtgtatatatgtttatatgtgtgtatttatatttatgtgtttgtgcatgtttatgtgtttgtgtgcatttatgtgttcctgtgtgtatgtgtttgtatgtgtgtctatgtgtttgtgtgtgtgtgcttgtgtgtgtgtgtgtgtgtgtgtgtgtgtgtttaggccattggtcaatgtcaagtgtcttcttcaatcattctccactttattttttgagacatggtctcccatttgggagaatgtttccccaaatcccatgtgtcaatgtataatttccaatctgttaccaactggaagatgctagaaatattagaggcagggcctaagagtccctgggctctggggtaagatagtaaagcaaagagtgagcacatggctctactcctctctttttcgctcccagctatgaggtgagaagttattgtcaccaccacaggttcccagcaggatgcactgtcctatcttcgggctcccagacagcagggccaattgttcgtggactagaacctccagaactccgagctcgatgacacatagtatctctgtaagttgactatctcaggtacctgtcacagtcatggaaaaccattagaggaggcctgtggtgctgcagtgggagctgatggggagctggaatgtaaacaggccagctaggtcccagtggtgagaaacagacccaggcgttattaagtaatgaattagccagtgcaaaagacaaattagccaccacaaacgacaaagactcccacaaattcagcttcttgagttgtctgtttaatttccacaaaaccatttcatttacagcaccattgaacatgtttcacctgcaacaggtatgcatatgtacatcattgtggggattcacatgcagttggcaaggagttatcgaagctctttaccttaaagttttaacaatcccccccgagatgtgatggttacactttggcagtggtgcccttgagaatagaaggaagactttaagcaacaaaactccacaatactgtaacataacctcaggcctccagaagggatggctctctcttgacaatcattcttttctggattgcactcaccacatttcagagtaggttctgtacctcttgcccaaaagctccagtcctcctaacttagctaagaaaattccatgtaaatacaaaaagtctgggggtgggacgaagagagagagagagaaagagagagagagggggagggagggagggagggagggaaggagggagggaggaaatgacaggaaacaacaaagctgctccaaattctaatacattctatacattgaggatttttgtctgatgcaagttctgtttaagaaactctttcctggtttgatagccttgtccccgctcatggtcacttgactggaaataagcccagaagcacaaaaaggtgacaggcggtcaggcaaggacagagcgatagagaacacactccgttagtcaatgatctctaactaaattcaatacccaaatcaaaatgtaaccaaactgaaatctagcctgcaactcactaagtggccagggataacttgaactgctgccttgagttagttcatgtgtggcacttgcggtagtttagtgcttgtgtgaatgcccacacagcaaggttctagcttctagcctcagcacaaccaatgaaacactttttaaaacactgcttgttaacagtgaatcttaattcaagtgtggtactaaatgcctgtaacccccggactcaggaggttgatgctgtggcatggggagttccaggacaatctgggagacagagtagcgaatgctgcaggatggaggacactaaacactgttgggcttgggatgggggagggttccatccacgatggttacatatggttacagccagtagtttagaagtagaaagaggcacaaaactctttcccagggaatgtctaggagaatttttaggtatcataggtttgggagatgatttggaattttttttattagaagccaataattctacttaataacatgtaatatctaatatggcttggacacacccaactcataatgcagcctgtcaagatggaaagacaccctgacaaagacaaatacacactccactgagtcttggagttcctaatttacagggtatgtgtgtctgcgtggggggggggggtggagattggtacccaataataattaaatgtcaagaaataaaggtcccaatttttaaaactaagattagaatgaaacaaagcaattggtttctataactaactggtgctaaagtgctggaaggaagtgatgcgttgtccacagagaaccaaagataagagggcaaggaacaccctagaaggacagaggacaagtcagcgtgcgggacacctggtcctgacctgtcccacagagggtctaatgcatgttgtaaaaacgtctttgaggttggggatatagctcaatagttgagcatatgcttcaatgaaaccttgaaggccctagccttgactggtcactactttaggggagaacaaagaagacaagcaggatggaaggaagggcaggcaagagggctgggggttctaggaacaaacccaagcatgcaggaacaggaactgagtgtcactatctgcctaagctcagagaaagtatgttgtcttgtccacagggtgcatgctgattgctcattcggggagggaaaatgtgcactgccctcagagaattaaaaagacaggaaaatcaatggcccaggagacctcaagcaaaatcatcacacatccagggctggaggtgctgaacacaaccaaggagcaaaaacacagcagcctctcgacttgtttgcacgttattaaacgcaatttggctatcttcaaaaagccatatttcacatgggttcctgtctataatttgctatgcagatgtcaatcaagatcattttttctgaggttgggcttaattatttggaattatgtgtattttcgttccagaacaaatgctttcagagattaaagaatgttactttcatgcaaactaaaattcattcctttaactagtagcaggaaacccgtaaacttatagtttttccattaataatagggcagaaagatatgaattcagatttggaagttagagacaaatttctactttggcttcaaccgaggcattaaacagtgtttatgcgtaggaatctgctcacagatcaccatgctgggctcctagggaattctccggcctgtcacatgtttgctgcccagagtagaaattctgtctttgctcctctcctagcttatgaagtgcatgtaatctaagacaataaacttgggggaattagaaaggttttagacatttttctatttacttttggacggttgatttacatctaatcaacttctaaggaacaaagagtttcctatactcctgaccacagctgcccaacagcctccaaattttaggctaataatttaaaaacaaacaacaaacaaaaagctgagcctctctgctttgcctggactcctaggctcaagtgactgtcaacctcttgagtagctgaggctacaggtgtgtgccaccatgccccccacccatgaaaatgttttctttaaaatggtgtttgcactggaaaatgtgggtgccatttctgtgaccacccaccacttctgttgaaccccgtgcagtttctcaataagttcaaggctgctagcctaggacaagatcactttccttcggccctgaaacttgtgaaacatggtgctggctccctcaaccaggcatccccaactcatacctatgaggctttggttaaacaaggatgcccaaacaaggtataaaacacatgacagacattttgcactttctcctaccaatacggttcagctctgtgtctggatcagatcataatcaatttatttaaacttggttaacatgggtcacacataacactctaagtgccaccaaacacattaaaagcagcaatcaaattacttttcgtttctcggttggcatcaacttttccatacagttactagttggcagctataataaatagtttaaaatatgcctgattaaagctaaggcaggctagcttatttatttatttagcaggagtgagtattctcctgcccccggagtattcatctgctcctggccaatgctacatggatcaatgtgacacaaagagaagactgaggaaacgtggacaaggaaatcattaccagaacaataggggcagccatcctacctggagcctctcagaagtggtaagtaagtaaatatgtagaagcctgtccctacccttgtgagtgtgaagaatacattacacgattaagcttctgcaacaccatggctgtagtttagttcccagcagaaagtcaatgttacacctcacaccactcagaacgaagagatggtccaagatcacctttccctccaccccagcaaagcctgcctcctcaacatgttgaaagcattttctgcctcttgaggcatcctgtttatccaccttaaacaactatgcagtttgcatttatttattaggtgtctgctcctggtgatctgagaatggacctaagaatatctatttctgcagcgccacaaatggccagcttccatcttttatgatctttgaggggaagagaagaaatcgtagttaatgtgctttaatttccccccccacccacttaagctttgagctcacctgagagtcagctagaagttctgattggtttaagaacaagggctacagggtgcatctctgtaacagagcagttccttagcacgcacgagctctgtgttcagttccccagcaccacaggacaggcaagactgactctgagtcctgtgtcagagttactgagtcccagccttcaacatccctgaaaacccacgttcacactaaaactgtcacagggaagtatgaggcgcccggggtaatgggaaggggtgacacgccacgtgaaaatcagtagcttgttccactcacatcccaaacgtctgacccctaccgacggcgagcacacccacaaagctttttccacaagcagagccggtgacccaaagcacctgtccagacagtctgattttgtgtgggaacccactaaaaatgagtactgttttcacagtgctgtccctcttgagtcttactaagagtctgtccctgctccctcggacagccatccaaagacacatcaatggccacttcctgagcatcccttgtgcttcggtaagtctccagagagggcccaccgttgtgctcggcacagccattgatgagagccagcggcagtgtccccgggggacagcacagcttcttagtgcagctctgggagatgcagggggcactgcaggtcagcaggaagtccttctgttccagggcttccttcaggtccaccgcttcaaactggatggtcacgttgtggattccagcatgatggaagatctctcggattttcctgctggcatcctggtaccccgtgtccttctggtactggatgtgcagggtagcgatggtcttcccacttatcagttcccagatgtgcacttcgtgcacactgctgattccaggcacgctagagagcttgctcactacaacagacaggagcagacaacagtgagcgctggaatggaagcttggaaccacgagcggggactgcgtgcgtaatcacacccaccaaggctgggcgtttaccacagccaacaagaagagctgcccctcaagagtccattttcccataatcacccttccctctggtttcctacaccacacagtgttaacctataagtaactcaagagcccgaggcaaaaagattgcaagttcaagaccagtcccaggaagttctaaagtagcctgggctacatgtgctcagtctgttccaagctagcctggtctgcatagcaagttccatgttggtcatgacaacatagggagaccctatctcagatagatagatagatagatagatagatagatagatagatagatggatggatggatagatagatggatggatagataatagatgatacatagattatagatagatagatagatagatagattacagatagatgggtgataaacaactgataaatggtaagtagatatgtagatgatacagacacaaatagatgattgataaagatatgtagatcaaagatagctgggtgattgacagatcaatagatgaatagctagacaatagagataggtaggtggatgatagataggcagacaggcagacaaacagacagatgggctagtttagtggcatgatgaaaagcacttaccagaatgctacttctagggatctattcaaagactcggaaacttttagcctctgaagcatgtaactgaggtgagcatctgacttcgatctgagcaaagcaaacgagaaggctccactcttctgagaggggcccttaaacaacctttttacagtgtgacatgctaccaagtaatgtcctggttcagacatgtcaactaaccagatcatcttcttaaggggaaaagggtataaaggtgtatattaaaaagggtaaaaaaaaaaaaaaaaaaaaaaaaaaaaaaaaagtctaggtctctttgttatgtgggcaaatggtccagtggtgcgttttgcccaagattgagaatcatgccacaaaggacctttagttcttggagctgtaaattattatcctaatctgcaagcctcatgaagcatgccacgcctccaccacatggagatacaggagaacacaccaatcacatgaagcacgcctccaccacatggagatgtagggagcttcccaacacactgaccaaacaatgtttcaatcataaccatagagtgtctgtggtccccatttgtacacagcccacttactcagctcttccatgtcaactcccttgggaaccatctgcagcaggatgacagcagtctccttgatcagtgggaaagcagatgacaaaataatgatgaccatgacaacagtcaaactggggtcaatgtagcattgccagttacacgggtcttctcgtctcagggggtgaacatagaatatgatggctgtgacgaccacaatcacggaccccaaggcatctcccatcacatgcaaaagaacacctgccaggaaggaaggcagatcagtaaatcccagagccatgtgctggagccacgtggtgatccatggtccgagctcacgagcgttccctgctgctttctgttggagcactggataggtcagagttttttaaaacaagctcagtgttgatgcacactatgatctcagcatttgggaggctgaggcaggaggatagcctaacctacatagggagaccatcttaaaataaacaaaataacaatagcaactactcagaagacaaaattacattgccacagccgtgggatggctcaagcaactgaagacacttgctacctggggtaggttccctctgtcctctaccttccatatgctctccctctctctctctctctctctctctctctctctctctctctctctctttttctctctctctccctcccccctctctctctcacacacagatgtaataaaaatgatttttaaaggtaaatgatataattacattttaatttcaattttttaattaaaaaggaagaaaaagttaaacaaaaaacaaatctcaggctagccacccaggaagaggaacagcctcggaagaatctgggttagctgtcaccttctgggccacatccctatccctcacaaccatcaagacatgacaagaaacagagctgagcaaacgatgtactatattctttcagacaagcctctggatattaaattcctttaaactttcatttcactctgtattagagaaaaggtctcactgtgtagccaaggctggccccaaacccctaatcttccagctttggcgtccctgtgctgggactgtgccaccatgcctggtttcaaagtttgtgtctttattagactccatgagtcaggtgtggggtggggctccccttctttgtcccttatgaactcatcgtgatggaggtcccatcaccttttattgctattttcatggtggcagtgtcaggggatggagcccagcatctgaccaatggcaggcaagcatcctgtccttggatacagtttcagacagaagaagaactgttcttttgggtctctggcttccctcaatcccagtctactcctgcttgttaggataaatctttccgccaaaagcctcaggggcctactgccacatgggcagtctctgccagcagcctgagttctgctcgcttcgttaaggccccagataaaacacagagatttattaggtacaaatgctgcttagccaatgactaggatttctcatctgctagctcaatcttaattatcataaatctatatattttataagacttatcttattggacgccttccattggcatcctcccttgccagaggatcacatcgtgaatctggaggaagagtggagggggaaaaggaccacttcctgcttgtccttgcttaaatataagtctccttgctatgtcacttcctgcctggatcaccacttttctacatttcccagaatcctctttgactcctagtcccgtcaaacttgttgcctcattggccaaacagtattttattaaacaatcaataagataaacatacacagaagtacattccccatcatctcttttctgtctaaataaaaagaaggataacttatcttttataataactgaagcaaactataaccataactatctgtcttcaactctatcaaagaccacagaaggataatatatacattccccatcacctccttttcctgggaacactagtctacttcttactggccttttgctatctccatggcacttagttttagaaggtctggagagcagagatgctgttgaagttccccctgaataaaaagccatttgtcacaatcacataacattaaaactctacgtgtaagggttaaagctgtggcttctaaaggtctcagtcaattcattgcagaaaatacgaaatcttcagcaaagaggatctgggctgtagatgtacattaagttagaatttagtaaattcagtgaaaacctggccagaggggttaaaaatgtagacaccaagtatttgcattcctgaaaggacaccagaatcttgctcctggaaatcagaggaggaggagaaggaggaggaagaagaggaggaagaggaggaggaggaggaggatgaggaggaggaggaggaggaggaggaggaagaggaagaagaagaagaagaagaagaagaagaagaagaagaagaagaagaagaagaagaagaagaagttagaaagagtctcaacctcacatgggtcctgtcttgatctgagaaaggggtatcattcacatgacccagcacaccccacagaatcacaccaatcaggagctttaaatcaccaggttgacattaaggacccctgtcaaaaaaccatggcgatggttcagacatacaggcacttgctgccaagccagatggctgaagttagatccccaagccccagggagtagaaagtagagtcctcattcctgcaagttgtcctctgacccctacacatgtatgtatgtacattcatacaatgtatttactgtacatgcaataaataaataaataaatatgatttaaaaaaaattatctgtgcctgggcatgatggcaggtacctacaacccggctacccaaaaggctgaggctgaaggatggaaaattcagggtcagcctgggctacatggggatttccaggctagcctgggctacaaagaagcttctggggcgcatattaagacccggtctgagaaaaacaaaaattaaaaaaactatgaaactgcccaggccataaaggcagagtatccaaaaggccacccagcatctgatactttacagaagcagtggggtgacactccagcaggacaatgttggaggtaggaggtgtgccaggccaaacagtgctgctggacagggtatttggccctaaaagagtgtgtggtgggacacacttttaattccagcaatttggaagcagaggcagaaagataatctgtgagttatccaggccagccaggactatataataagacccagtgtaaaacaagagtgttgaacttcggctatgtatgcttagaaatgcagagagtaaaaccagtcagcaaagtcaccgagagaaccgccaagcttgagcatatatggatggggtctctggtcagggtgcatgaactttcagagctcatggtgtgattaaaatacacccagtactcccaccatccaccaccgccagcagcagcagcagcagcagtcagttctcatgggaaggaaagagctaaacttgaaaaaaacagtctcttagaagacataggaacagcaaaacatacagcgcaggaatgaaccatacgtcaaacagtgctaatggaaaccagagtaaaagggagaggcaggaggaggggagcctcgcccccagagtgcagctgagattccctctccactctacaaaggggtaaattgaggcactgaatggctaagtgatttgcccggggtcacacagccatcaaatccaagtgggtgtttgaacaagatggccctggtgatttgaacacatttagaagttgtcaaaggactgctctagaagaaaatatgtagttaggagggtctgcttggccaccccagctatccaaaaggttcactcagtagaactgataataattccaattgctaacttcttgctcatggagatcgaatggtcagacctggaaggtgtttgaattgagctgctcacacttcctggcctctgagtgacactcttgttaaatggcattgtccccttgccttttactgagtggttacataaagcaacaggacaccaattcgatatatacataagacagtcccactgtctagcattctatccccatcctcgccagcccctgttcccagccacaggagaaaaattcagaacattcccaagagttgccctactcttgacaggagccaaggaaacctttgctttcttggcgacagcaccaaatgttactgttcaaacaggaaaacctactgtctccttctcattctttttgttgttgttcttattctcaatatttatttattatatatacagtgttctgcctgcatacatgcttacaagccagaagaaggcatcagatctcattatagatggttaagagccatcatgtggttgctgggaattgaactcaggacctctggaagaacaggcagtgctcttaacctctgagccatctctccagccctccttctcattcttaatgccactatctcattaagtctaattggggtcatgccctcacttagaggcagacagtggagctcaaagacacatgcctgaagggaaagtcagagcaacagctcgggcctgtaatccaagcacccaggagtttaaggagaatcctggctagctaaggccaacctggactacagagtatgaatctgagtgttagaggaagatggatgcctctggaagtatggatagagggctgttgcatcctgtcctacataggctccaggccccaccccagggttcccacgtttggccactaagaatcccacacaacactggctctcacacttctggttcccacagtctacactaaaagtttgttttgcatcccaacatacatggagatacaagttgaagcaggaaaatgaaccgatatatctctcttttctgttctgtttcattccatcctaatgatgactaaactctgctaagcagaatttaggacccaaaccatcatgaacttcagcggaaaagaaagctgtggatggggtgaagattgcaagtgtagagtgtgtgtcacagtttcctggcaggatgggagggaaaactttcatttcaactgaaaaaactgaacatattgggggattgttctgatttgtttgggggaattttgttttgttcctttcttttcctttttctgttttgacacaggggctcggtatatggtccaggcttgtctccaattcacacttctcctcccttagcctctggagtgctgaggcaactgttctgaaccaggaagccaagctccatgtgctattctgatacatgaacatactatgcaatagtaggtcaaatatctagtctcctgaacctttctttcttttccttttatttatgaaaaaaaaaaggtactcagagcctttccccctagctgtgttgaaacatacaacagtactggctgctgtcagagttgcccactgagtgaaggcacacaggcttaggtagtgggccaacttgggttttttccacccttagcaaaatcacagtcatcaccaagcatagtggtaaatatgctgtaattccagcagtgagggacctaagaaaggaggaatgccacaagttcaaggaccacctgtactacatactgagtacagcccagccatggctatatataaaaaaaaaggaccctgtctcaaacacaagcaaatcatagctaggtaaaataagctgtagtggggctttggatatggatccatggtacaatgtgtgtttagcatgtacaaggccctgggttgcatgcccagcattacacacacacacacacacacacacacacacacacacacacacacactctttttaaataaatagaatgcactgtatgtcagtaatactcatgaaagtagcaaagcaagtatagcagcaatgtgacactcatgtgtggagatcagctcagaccaacctggccctgagttatagaactcatgagaacatgataatgatgtgtggcaatcaggagaacatgatacatatgtagatatgagaacatggcacatatgtgaagatcatgagaacatgacacttatatgtggacatcaggagacatgacaccatatgtggacatcaggagacatgacaccatatgtgcacatcaggagacatgacaccatatgtggacatcaggagacatgacaccatatgtggacatcaggagacatgacactgatgtgtagggaacagaagaactcatacatgtgtgaatttgaagagaccatgacacatatgtagaggccaggggaacatgctattgctatgtgggaatcaggaaaacatggcattcacatgtggagatcaagagaacattttgctgataatgtggaggtccagagaacacgactgatacttggacatcaggagaacacgtcatatatatggaatgagaataacatgactcgtggaagtcagaggaacatggcattgatatgtgtggatcaggagaacatgatacatatgtgactatgaggagaacatgatacatatgtgactatgaggagaacatgatacatatgtgactatgaggagaacatgatacatatgtgactatgaggagaacatgatacatatgtgactatggggagaacatgatatatacatatggagctcaggaacacatttcactgataatgtggaaatcaggagaatgtaacactcttgtttggggttcagtggaacacaccactcatatgtggaactcaggagaacatgacacatacgtgtaactcagaaaaacatggcactgatctgtgaacaggcagcagtagcatggcttaattagagcaaagataaatcattagcaactagtttttccctcagaatcaatgcaatgattaggcaagagaaagggtcatagtctgcaggcgactgacctactttccaacacacggttgccttacagaaagctggacagaagtcactgctgcagcacagccccattagctatgggaaagggttcgaagctagcccaaagacaatcctacctctgatattcagtgcttcagactttttctcttttttcgtagtctcttctggttcattctgggtgttcagggaatcacctgcattcaaagaagaaaccttgtgttgtgtataagttctacaaacaaaaagaaccaatgaactcaaaatgcagttttgttattttcaatttctcttagcatacgggagtccccgcctctcccacactcaacccatacaggtgcctttcaacccagggtaagcccgcggtccgcccttggatttcacagacacttttcaagttttaaacgggacaagtataagcctacacgtatgccccaaacccacaatacccaaggggcagaagggagccctgacattgatatgtcaaggcagaaaacaaatccagcagggaaggggaggaatggggagtgttctctattgcccaatagtaagaatcgatttccaagatcaatactgccacaaggagaggggagaggataagggctgcagggtcaaggaggaaaggagagagggagaaacgggggaagagaagaaagaaggcagagaaggaagaaagaacagaaggcgggaggggaggaaggaaagttaaattagaagaggggcagaacaagctgcgaagaggattttaacagtcaggaaacaaaaggcaaaggagggagtggatgagtgaatgggaccagatgcctggggaaaagggaggatggaaggaggacaaagtggtcccagcccagaaggatgcaaccgaaaggcacctgctacattcgagaacacggtcccgccctcctgcagctttcttccggccgaggccccccggagagtcactgctgtgtctgagccgggggctgcggctgccacagacccttgcggattctccaaagcgccacaagggcccccctggtgctgcggctgcggagggcgggtccgccgccccctcgcgcatcccgcgaagcaggcgccgcagtcctggaagatgagcagccccactatgttgaccgccaggcccagggtgcccacgatgagcaccagctcgggatcgtcgatgcgctcgggccgcgccaggcgcagcacggcctccacgaagatggtgaagcagagcgcggtgaggaagacggcgttgctgagcgctcccaccacctcggcccgagcgtagccgtaggtggcgcccgagccgcgggagccgcgccgcgcgatgtagccggagcccaggcccacgcacagcgagatcaggtcggacagcatgttgaaggagtccgagagcagcgcgatggagttgcccaggtaccccgacaccagctcggccacgaagaaggccacggtgagcactagcatgaacagcagccggcacgtcttgcccgagtagcggcccatctctgcagcccgcccgccgcgccccgcaacaggtggggggtctggagcccaccgcccgccgcaggcccgccctgccccaccggggccttttgtacagccagctcgcgcccgcacggccagagtctgcgggagtggccccggtatcgcaaaggccacctcccggggcccctgcccctcctctctcgccgcccaagcctgacttggcaggtggccaccggcctgtgtctccttctaggactgggttggagaggagagctgccgggaggaggaggggcgcatcgggatgccaatctccttggatccccacctccaccctcacagagaggcgggatgcacccgctggtcccctctcctccagctcccccaccccaccccgggccactacagatctgtgaccgccgctgataaggaccggggctgcagtgggagtgatcgctgcacacccgtgcctacgtgcccagacgcgagtcgcagggcagattccatatgggctggtggggtcagctgcccttaaaggcgtttcctgctcttccctcggttaaaatggtatctcactcttcacgtaaccccccattcctgagcccaccgtcaaagccctttatcctctcctcctcttctcaaagagcgcggatccttactgttactccctcacggcacagtacccccacctcctctgggggtagggtgggggtgggggggtctccgtgatgatctttccatagaggagcaaaaggcgggcagcccagggcacatggctgccacaccggtgtgcacacaagcgcggaacgctgccgcagcaccccaaagcccggatactttgtgctagctacaaggccatggaagaagccagtctcctttcataatgtgctgcagagaatttctactgaccccgtagatgacccgatactcctagttcaattgattgacccaaatcgtttcttccaaacaggcccgcttccagatgacggtcactcaaagggaacatgtccagataccccgcacagcagccctttcagaaagggtattgggtcacttcagtggggtgtggatggggggggggggctgtgctcacttttcttttatgaagggtctgaaggcaaaacagagtaacggctctccttgtctccccatgagctttcaccacccgctcgggggattcagctgtttggagcttgaaaacgaatacagtgcctcccacaaacacagagcccccccccccccaatcaagtcatagtagtgcaggccttttcctctcaaccgctccagaggattagcttgagactggaatccattagcaaaacatttaagaaataattccgattaaatttgtggctatggctggcaagtggaggtcagagggcaattttggggagtggatctctcctcccacgtggtagcgagtctctgggattgaactcagagcatcaggctcggtgccaaaccctttgatctgctgaaccatctttccaacacctccctgctgtgtttaaccggggctgccagccccacttgtcttcatcttaaaaaatgcttccatgttttccataacctctgaaggttcctttcattgctgttcaaatatccccgatttgaaggtcctacctcactactagataaaccccaaatgcaaggagcttattaatactcccttttcagacaggcagatggctcaagcctgtaatcccaacatttggtagggggagggaggtggactgctgggacaggtcaacctggcctacacagagcgtgaacttgtctttgaataactaaataaatacctccaggagaaatagcgccacactgagaacttgaggaaattctctaaataaataaacaaaaagttatcgattatgtagaagaaataagaaggtataaaacaatgacatttttaagctatagaggactggacaagtcccttaatcatcggagcctgttttcattactgtaaactgggactaaacaaattagtgtgtaaatatagccgatatctagtatacagtaagcactcaataaatgctatgattataattggtagtgtgactagctgtagtgcagtacacatgttataaaattcaccattggtcaatagataaaatgctaacatataccagggatgtgtccaagtactcttcccagtatataacttacattgtcttcaaattatgaaacctctaaaatatttgacatatgacagcaagagtgggacttgaaaatataatagctcagtggtagaacacttggatagcacttgcaaggccctgggttcaaaccccagcactgaaaaaaaaaaaaaaaaaaggccccacaagcagtggggccttttataactcacccagcagggctaaagtgttcctggctaattgtatttcttgttcattcacagctggaaaaaacccagaaatcagcagaaacatatcactcccgcctcctggttagtcattctcctaggcaaaggcagataagaattgtgtcacgggccctggagcaatacattaagaaaagccagaggctgaggaccaggagatgtctgtggtgtctgatgtccctgtcctcagtcagttcctgaccataaggagagggtaagtgttcagatactgctagtaaaatgcactgtagaaaagtgaggggcgtatgtggcactgtgtgtttgtgtgtgtgtgtgtgtgtgtgtgtgtgtgtgtacatgtcatgtttgctaggtgtgtgtgcacatgtacactcatgtggtaagactgacttccacttttggggggcgggtgagggaggggcgagagcagagtccctcagtgaacccaatactccctggctggctggcagggagctgcggagatcctcctgtctccatcccccgcccccgctgagaccatccagtgttcaggatgtgcctcaccttcacatagttgctggggactgaactccggtcctcaccttgcacagcaagcacatggctgactgggtcatctccctccccagccccggaaaatgctgtggctgacttacattatatgccctatctaagttacttgacagacacgggctgtcttacagtgtatgtttcaacagctttttgtttattgaactcttatttgtagccctggaccaagtactttataggtattgtctcattccagcttctagtaccctcgtgcagtattttgaacatattaaataatgtttttattacaaaaggctctgttttgattctgaagactttggaacctggagtttttaggccaccaagccaagatcacgcagcctgtaaatgacaggtgtgagttctaacctaggcacagaatatccaaagcttattttcttcacttataccagactgatcttttttaatccttttgtctaaaaaattagcattttatttgtttttgctttgatatagggttttgctgtataacccaggctggcttcagactcagtctgcctatctttgcttcccagtactgggtttataaaatccctttttgatgacccaaaacttgatgctttgcagttcataagtttggcgattattatattcaaaattctttctttgtggcattatgattttatatatccatttttaaatgtgactttaaaagtaattaaggcatctagtaagatgcctcagcaggtaaagggacttggcacccagcctgatgacctgagttcaatcctggagacctacatggtggaaggagagaactgactcccacaaattgtcctctgacctccacctgagcaccatggcctacacccatgtgtacatacacacacacacacacagagggagggggagagagagagagagaggcaatacacacaaataaataaatcaatcatggtccttgaagttagattcacttggaactaaatctgagctctactatttgctacaagtcatgtgacctgggcagggtcctctatcttctccttcctcattggggttacagttgtaacagcgtctaactcatggggctgacatgagactcacataagggaatggaaatccataaggaaggttcacctctaagtgagtgttcatgggcaacccctcccctgagtttggtaatccaacatggaggaggtgggtatttcctctcaccaaagactcagagctttagcttgtctgatgcattttagggggcagagaggccaggctatcggggatcctctgttaagagcactgtatctgtggtctatggtgacgtacagagaaacttcaaatattttcttttttctttcaatatttcagcatcatctaagaagtggagaaagttatataagcattaagtaaaccatttcagggctggtaggatggctcagcaggtaaaggtccttcacaaacaagcaagagtgctaaattgagttcaaccttccaaacaaacctagagagaaacaattccaacaagttgtcctctgacatgcatgctgtgcccccatacccacaaataataacttaaaaacgaataagatggttcaaaatccctgtaactataggaaacaattcatcagaatgacaatacttccacagatactggggcccatgttagtcactaacttgctctttagaccaggctggccttgaactcggagatctgcctgcctctgcctcccaagtactgggattaaaggcctgtgctactaccacctggctagatttttttcttgggtggtggggtggttggaatacaggactgctgtgcatatccctggctgacctgattttttgtttttttgtttaggcatagatttgtacagagcaccaggatgatgaagggttttcctcaaagtatttcagaaaacactaaatgtgagagattcttgagctgacatggtgactcagttttcatgacagaagtgtgagatgcgaacaaggataaagccagggagcagtcagtcagcaccgctttgaacaggccactgatgcagctgaaatggtccttttggcccgtcttcactggagagcagagcatctacctgggattcactcatgattaccagcactggctttggactggaggcctcatccttctgccaggtaacaagggcagccccagaaagccactacagtggtgatattgcttgttaacttgcgaggatccagaatcacttaggaaacacttgttcatatgaggaagtatctagactgggtcagttgaggtagaaagttaggcaccgccattccactgtctggggtcctgggctgcttcaaaaggagaaagtggtttgagtcccagcaccaaattctctctgattcctgactgtgggctccgagcccagctgccttacctcctgccacatggcctctttaccacaacgccaaaaccaacccttccttccctaaggtgcttcggtcgggtatagttcacagcagagaagagtcactaacagtcactgtcatgccaaatgctaccaaggcctgtggaggtgtgggcatggtgaggcggaaagggaggagagcattagagcccaaaccaggaagttagaaaacaccttcttcccattcagaggtcaacactactcactgatgtcatgtgatgtgtactgggaagtgcggttcagctatgaggctacttctaattcaaacgaaggagaatcttcaaacttaaagagaaaggtagaaaatgctgtagaatattcctgcactctgtgtgaatgttgctgtgattggtttattaaggaagctggctggccaatagctaaacagagtaaggttaggcgggagagccaaactgaggatgctgggaaggagagggcggaggctggactatcagagagaagcaagatgggcatgtcgtactgagaaaaagcaccaagtcatatgacaaagcacagataagaaatatgagttaatttaaatgtgagaattagctggtaacaagctattggccaagcatttataattactattaagcctctatgtggttacttgggagtggcttgtgggacagaaacttgtgcctacaaaatgccactttggtgctcattctaaacctctcaatagtttcaaggacaagtaaaattctatattgtgtcatagtttacaaaaagatttcatttgttatttgaagccatcagaaataactcataccatcagctttcttcgactgatggacttccctgaaactttagactacacaaaaatgaaaatggccatttgcccaagaaattatgagaaataactgttcaagtaatccctgttagctgagtgtggtggtgaatgcttgtataccccagcatttgcgaggcaaagacagaagggtcatgagttccaggtcagcctatgccacatagtgagtctcacaccatcctaggcgacaggtcagcctatgccacatagtgagtctcacaccatcctaggcgacacagggaaaccctgtctcaaaaactttacttaattaaaacctcctgacagtgccttcatgtaccaaatgaactaactttgtacatccaggctggggcggcacaaggacacaggctacagaggcatgaagatctcagagccagtcccaactgtcagatgtgagccagcatgccatttctgttcccatttataatctagacatggggcatccctctcttccatggggaatcaagtaaaatgacaaaagctacggggagcccccccccactcccgactcaccgtcaacctccccagagcttgacttccactaagcagcatcgtagaatctatttgagaggtatttagaacattacatttttcataaaagtcatctatctccccttggtccaattaacctaattagtttaattggcttataactaattagctacaaatttcaacatatttaaaaggccaggaaatgtaattcaatggcatagtgacctgagaaacagcctattggctgtccaaccatccctcacatggaatcaaggccctacactgcatttcctagaacttccttttcagactcgcctgctcacaagacctgagctcttagagagagacaatagctgaagcaagatgtgcccagggtatcggggtggggcgtctgggagtgagaagatgaggttattctccaacacactcaggtcaagacagaatatgaggggtgtctagagtccaaagaagcctgtggggatagagatgatggagagacagaaacagggctgccaggtaggtccaaagtaagggtaggccacaggccacatagtagttttgacaggtcatagtagctcactgactgagactgtttttgttattagcttcagtcttgggtacaaaggaaacaaaagagtaagtccatttgctctctttgctcctccagaaacatccaacaaattgaacgggagggagagatagcttccctggatctacagaaatgcaaataagaaaaggaagtgtggccatatctgaaaactcttcagaggtaattagatcaggccagcctggggactggcaaccaaaacaatctttcagagacaggaaggcaagatgtgggagagcaatctggactgcaatccatcctgtcccctgtaagagggaaccagattccagaagccattaacagcctaaaggtgtgagtgctgtctaaaataaatactgttggggtgtgactccagtatccgtgcctggcccctcactgtgttgggtagttgtgtgtgtagaaggcagcccatttgttcctttagttcgaagatcttccagccagggggttgaagtttaattgattgagtttaatctatggaatcagcatcccagggtcatttaggatgataagatcctggactttcaggattcattgtgcagaacatgttttgaagatgcctcctagccaggcgttgtgcctttaatcccagccttcaggaagcagaggcaggcagatctctgtgagttcgaggccagcctggtctacagagcgagttccaggacagcctccaaaacaatacagagaaaccctgtctccaaaaccaaaaccaaaaccaaaacaaaacaagaaagaaaaaaagaaggaagatgcctcctctccatctgttcttctgcacagtgactttgatgcccacatccagatgtgggggcgatgggcttgacactccttccatctcatcaccacagtcttggatttgaaaagacagtgatgcttcaacttagactgtccaaaaattgtgctgggaatcccatgccacctccagccatgtcccgaagctgctctagcatgaggaagccacacagacaggccatctgtaggctgtgtggccaacaatcctgagcatcaagaccaaccagaccatgtgccagatataagtgactgcagcctccagccataaagtgtccttactccaccaggccaaccccagcttctgagtcgtcctaggtgagacctcagacactgtaagtacaggcgggctgctcacacggtactcttcccaaaccccaaactgcggattccttgggtgtaaatatgaggtgttttgttagagagtaacagggagagccatgtggccactacacaccagtatctgtggaacgtgaaaatatttaagcaaagccctgggaaactagcataaaacatttatggtatagcaaacaaaacaagaaagatgggactatcaggacctgtacagggaatattggttgggatcaaggcatggcagtgattgtttgaatcatacctaagggtagagattaggttgaactaaaaaatgccttttgagcaagaatatccagctcaagggagaaaactgacaagacttgtttggacagcagttgcttttggcagacccataagacattgacttcattcctctccctgtgattagaaaacaacaacaacaaaaaaatctatgtttgaaaacaaacgtctgacccagaaaagaacaaagaagaggaagacagaccaataagagcaccagccttccatatggtggagcgggaagggggccaagtgtagagcttaattaaaccatcaggccactagcacccagccgagcctttgggagagcacagatcagagcactggaggaggccggtctccagcctcagagccgacacgcaatggggagacagccttgagaagcagagaacacttccgagcttcgaaagtcccagacaacttccgctcttgaagagatgatgagcctaatgctgaaacaaactttagggagtcacttcctgaggaagcagaaacacaggacccgctggttgtgaaggaggctaatgaagttaccagagtgggccacaaacaggggtacaaggatgatgggggtgccctactggatgctgtgaatatgtttattggctgatgagtaaacctgtttcagccaatggacaggtaggatgtagccaggcaggaagtataggtggggcaaccagattaggagaatgctggggagaggaatgaggagaggagtctcaagagagacgccatgtagctaccagaaagttagggaaccccggcattctctggtaagccaagactatgtggagaaacataagttatagaaatgggttaataattaagggagagctagccaataagaagcctgagccaccagccagacagtttataattaatataagcctcagtgtaatagctgcaggaccaggcgggacagaaacttctgtctacacaaagtcgaaaagatacttagtgttttctctccttcatttcttccttttttccttccttctcttgtttctctccctcctccccttcctcttcccttcccgtcttcctaactttcctcctccccttcttccccctctcttcctctctcgtccccatccttccctttacccctctcccctcactgtatagaaaagttccacaagtctgaagcccggacaccattgctaaaccctgcagttccacagaggatttaagcttcactccccaggaaggatccgagtcacatagggggacgtctgtatacatcaccctgtgctaacagagctgctagaactgactgctatgcaggcctggaccttgaccagttctggcacacatgaaacacaagaaaacaagctacctagaggggggaaaatatagtaacacaataaacatcagaatcaggtctacaacttggagagaacagcagagccagagagagtcctttcctcacactgcttaagtgtgtgtgtgtgtgtgtgtgtgtgtgtgtgtgtgtatgtgtgtgtatgtgtgtgtatgtgtgtgtgtatgtgtgtgtgtgtgtgtgtgtatgtgtgtgtatgtgtgtgtatgtgtgtgtatgtgtgtgtgtgtatgtgtgtgtgtatgtgtgtgtgtgtgtgtgtgtgtatgtgtgtgtatgtgtgtgtgtgtatgtgtgtgtgtatgtgtgtgtatgtgtgtatgtgtgtgtgtatgtgtgtgtgtgtgtatgtgtgtgtgtgtgtgtgtatgtgtgtgtgtgtgtgtgtgtatgtgtgtgtgtgtatgtgtgtatgtgtgtatatgtgtgtatgtgtgtgtatgtgtgtatatgtgtgtgtgtgtgtgtgtgtgtgtgtgcctgcccatgcctgtgtgtgatgtgcacatgtgcaggtgtgtggctcacactgcctgtgtgtaatggaggccagaggaagacgacattttcctgaccagtcacactcatcctcactcctttgagacaaggtttctctgactctggggccaggtggtgctccttcctctgcccagtgggctacaggtgctgaggcagccttgcctgaccttcctgtgtgggtgttggggagtccaaggtcttcttacttgagcatctcgttcttacctgctgaatggtctccccaggtctgacattgccaagttctaaaatgatggttgtcagcagtcatgagcatctggcttgcaggagatgctgaggtgtgggaactaaatttacctttaataaatgtctccctttaggtcattttcaactttctgacttcttaaaacatgtggtgggaaattctaaaaaaaataataaaaataataataataaagactgacgctgggagctggtgagatggttcagtagttaagaacactggctgctcttgcaagtgtttcatccccagcaaccacatggtggctcacaaccattcataactctgttcaatgggatccaatgccctcttcctggctccgagggcaccaggcaggcacacaatgcagacgaacatgcagacaaaacacccacatacaaataaaagtaatcaaaaatttaaaagccaaaatcaaagtgaacgtggaagtctagaatggtaaactgaggctggagtctgacttcaagatacccgtatcagtccgacaaacacctcatcccttggttttagcagacacatgattgcatgcagctaaaaagatttggagagctgcaccaaggatcctcttatgaagctggatccctcagtggaaaattcaaactcaacaattaaatacagagaatcccactgctccgaagggcacagcaaggagagtgtatatattagctggagttgtgagcagagagaaaaacagctgcatggaagctgaaggtaacatgggagtgtggacaaatgataacgacaggaaatgtcaggctaatggtgtttaaatgtacccaagctagttttacaccaaagcatctctgggttcttgattctttgtttttttattttttttagttttctgaggcagggcctccctatgtagccctaggtgtcttggaattcactgtgagaccaggctgcctctgccttccaagtgctggggataaatgtgtgtgccaccacacctgtgtttggaaatgtacctgtgtagggctggagagacggctcagcggttaagaggataggctgctcttccatgggaccaagtggctactcgcagctgtctgtaactccagtcccaggggatctaatattagccctcccccttctggcctctgtgggcaccagacaggcaggtgatacagatatacacacacaggcaaaactcatataccatttttaaaaatcaagtaaaaatgtgcaaaatcttttaaaaatatgcttatatcctgtacttcagaacgaagcttcaggaaacaattcattaaacattgattcacgatggaaaagtgcacagcacacaaaccgtctggggtggcacacacctagagctctaactctcaggaagcatgaaaaggaaggggtaaggttcaaggccagcctgggttacacaggcgaactctgcctcaaaaacagaaagtcgggaaacaagacacctagagagagacggcaaacacagtaacagcacgaccggatatgcgggaaccgcaggtgctgagagtgcaggaaccagctagaaaatatagatgccattggaaaggggaaatcttgcatgtgtgaagtcatgggtttgatccccaaaataaaaaaataaaaaaataaaaaagaggaaaatatgaagaagatgaataaataaacagttaaaattaaaacttctcccagccaggtgttagtgttgaggtctcagtgagggggctggactcctgcctctgccaactcacaggagcctagggacaaaccttggacttctgccacccactggcaacaagcagcaaggcttccggttggtcaccagcctctcagggaagatgaggcagaatgtcacaatgcctaaatgtccagaacccaacagaaaatctttcttcctactaaaaactgggaaaaatgcaacttgaatgtacaagacactaaatctgaggtggtaaacatgttggaattacctggtaagtagtcaatcataactgttttttggctgttaattatgaacatacttgaaacaaataataacaacaacaacaacaacaacaacaacaacaacaataataataataataataataataaaaacctcccagcaagaaatagagaatataaaaagaagtggaggccaaggagaccggctctcctaaaagcacaaggactggtgtttcgtcgtagatctcatgtgaaaagtaaggtatgctggcacacttggaatcccaatgctggggaggtagtctagactatttgaagaactccaggccagtgagagaccttgtctcaaaaacacaagatgaaaagagcctgaagaactgcactggaggttgacctctggcctccatactcaaacacacacatgtacctgaacacgggtatacacgcacaacataaacacaaattttaaaaaatgaagcagaaacattaacaataaaaatataaggaaccaaataacaactcaatagatggcctcaacagcagaaaggagaattcagagtgaggaatcactgaatttgaagacaaaataatagaatatactctttctttttcctctctctctctctctctctctctctcactctctctctctctctctctctgtcttcctccctccctccctccctctctccccccgccctggctgtactggaactgtctctggcctcaaactcacagagattcatctgctgggattacaggtgtgtgccaccatgcctcgctgaaagtaccctatcttcgaattagaaaacagaaatagaagtgggggggaagggagaagggaggaaaaaatgaagggagggaagagaaggcaggagaggaaggggaacaaagaacagagcatggggatgaaaaagtaaaataagaatgctcttaggttcacccacactggacgctcacggcaatttagacaggtgcatagtaacacctaaggcaggactgcataccaagatgtcctcaaaagtacagcagaaaactcaagaccagaaccctgaaaacattcaaggaaagcaaaaaaagagagagaaaaattagaagaccaaagtaaagttgaaaaatatcagtcatgagccctgccttccaacaactgcattaaatataagtggtttatacacaacaaaaatgagctcagtagccgaaaagcactacacggatgttcacacaaaggacaccagccgctgatgtccgcacagcttagatggatctagggagcgttgtcgtggaagagaaatgccactttcaaaggctacatgggatacccagcatatcaacaccaagatggagggtggatgaatgatttccagggcccagagggggggtgagggtaggcgtggtgggtgtggctgcagaacagcagcagaagggctgtctgggggctgtaacagtcctagatctgaatttgggtgatagttacagatctacatgtgatatggtcacaaactgtacaaatgttggtttcctgattttgattttgttaatgttactgctttcactggcgccaaacagatgaactgaagtgtctgaagtctcttggtattgtcttcataattttttaatcttgaaaaaataatagtttttgcttattctttgaaatttttatacacacacgaaatgtattttgaccatacatatcccaacttatgtcacttgaaaaaaaaaaccaaaaaactatcgagtccaacttatgctgtgcttatgcgcagcgtctggaactatgaaccttaagtcctttcgatctaaagctaatgggcacgttaataagaatcaagaagaagagaagggagacacaacagatttatctgaagatctaccaagacagccacatgggtcacactgtatcctgctttttaaaagacacactgagccacccaggctattctcaaactctaggctgaaatgacactctatctcaaccttctgaacagctgagatgacagatgtgtgtgctcctgtgccaagtgtacaggaacatttattttaagctgttaaagatcactatatatatatatatatatatatatatatatatatgtatatatatatatatgaaagttattatatatgcatatatacatccagtaggacagctcagtaggtaaggcacttgctgccaagccaggtgatctgagtttgtctcctggttctccatggtagaaggaaaacactcctgcatatgcctgcagtcccaatggcttagaagattgagtggattgaggccagcccggggaaacataggaagacacatttcaaaataatttagtcataaggatggtggtaaaaataacactgagaggaagcccaacactcagaagatctctttgggaaataatgtgccacaaacttactatggtttcacgaaatacaaacaccagattctaaaaacagagttgtaataagattcacaatggtcaagcatcctctttgacaccgaacctggcaaccacagggggtccagacacttgtatcccagctctggggctgtgctcctctgcttcaccctagtaggaatgcccctcccctcaccccatcagcattcccaagtggatgcaagggaggcgatggctctgccttgatcaaaatataaccaataagaaccaactataagaacgttggccaatgacgaagtcggctgccgtcccatagctgtgcagagcaagggctttgtccacacagtgagctacttactgctttctcatccttcctctttattgttgtgtgtatttgctcgtagccttgggtagcctcaaactcactgtcctcctgcctctgcctcttgagtgtactgtttggctctgatcttaccaatatcttgtttatagcctgttttctttttttgaacaaccatggcaatctgttaccaccatcactacccttctatgagtgttctatttgtaatatgacttcatcttcacaacatccatgaggtggagatttcccaccttacaggtgaaataacagggtctaagaaacttccaggtcactcagattggaaatagtatcccatttactgtatgctcatctgtactttcccagtgttcttctgtgaccactgacaaacagctctccacatctgcacttattttcctttgtttgggtaaacctacatgaaaaatggaaataggaagtgttctccctagctaattatttttgcaaaacacttttcttcagccacatgtgactgagctgtaagcacactctacagagtctaacacctactcttcattaacatttaattcagctaatacactagaataaaacatgcaagagtgtgggactgagctcctgtttccattcccttctgttgggtttgatttcacatttgaaaaggtaccaaatccccaatcttccttaagacttccctctttactccctggaactgctccagaaccctttcaagggcagaaagggagaagtgaggttagccaagagtcagggacacagagaaagggacgatgggaatctcgtcagcatctggtgtgaggtaagaagagagctacagcagcgtgtgttcacacctgccactgagtcttctgtgggagcagactgctccaaactcgtgaacaaaaatacacaaagcagactgcttcttcagaagcttaaccttcacgctccctaagatgactagtgaatgcccagcatctgtggtagaatattactttcaggcatgtgacttttgtttctgctgcatttaactctgaagctgtgttactgtgcttgtctgaaacacctgatgatctaattaaaaaaaaaaaaaaaaaactaaacagccaatagtgaagcaggggcaaggataggtgggtatgtcaggcagagactatgaataaaaggagtcactgaggaagaagaggcagcaagggggggggcagtaagacacaaagaagaaaagaaaaaagcccagaggcaaaggggagtcgggataatttaagttaagctggcaagcaacaagtcaaactaaggctgggcattcataagactccctgtgagatttacttgggtggtgggccccttagaaagccaaaagaggaaaaaacatttcacacatcaagctttgctgcacaggactcctcccctttccagtttgaaatatccacactcaactggccacaacagccacagaaacaaaaccctccctggcttcagattccacccaagaaactggttcctggattcttccagaattcttcagttcacaagcacctcaaaagtacagaagctggggttctttgctcatagagatttttccccctccccttacctgacaaggtagtacactactgaaaacccagcattgggctaactgaagcaggagaatcacaagttcaaggctaacctgggctatataacaagatcctgtctaaaacacatcaatgaaagactttttatcctcttgtagtctataactcttgttatgttggtatggatgaattaatcatagctcctattaaaatgcaagccaagccaggcgttgatggcacatacctttaatcccagcacttgggaggcagagacagaggcagaggcaggtggatctctgtgagttcaaggccaacctgatctacagatcaagttccaggacaacctccaaaataacacagagaaaccctttcttgaagaaccagaaaaaaaaaaaaaaaaaaaaaagcgagcccactgatactgggctaatgtcaatttataaaatttaacttacataaatatgtattcactaagttcacttaggtaatagtaataggaacatcaaaatatgactttaaaacactaagacatggaaattatgatacatcaatggtaataaacccaatagcttccttaagcaaacaggaaggcagacacactgaaatttctaacagattaagtgactccacaaggtaacacaatctgaatgatcccaatgtctgtggcccttacacccagctcggtgcttagtttagcgcagagtatggtcagaagaagacaagacagcccgaaactgagttcagacacccaagggtcaagtgcagtgttaagcctctgactagtgtctcagatcagacataaacactgaaccagaccagctcccaagtgagagctaggagttaactactaacagttcagtttgtaaagcagaagggcatttgtgtgtgccagttacattatgtgtcagagtctcctatcccagaacaaaagcaaatttaaaatcctaggagcagctaaagacatgacacacctatcagcactaaccatcagaaagtcttcatgccttacatttacatctgacaattacacacatactaaactgtgcattttctggcctagacccttaaggggcaattttcaagtcatgttagatagagctgagacataaggtctccagttaactgataattgtcttttaaaagggctgggccctgactgagttttaaacattaagctgaatacatatctagactcttatttgttcaccatacaacacaggtgctctcagaacatgtattctgccaacagagatggctaaaggacttagcaactctagttagcagaaacagtgggactacaatgaaaaccgcaaagttacatggagagaaattaagaaatcccttaaagaattaagtgatactagattccatagtgatttttttaaaaaattagccttcatcaagcttctgccacatgctaaaaacatgtagcattttatgtggagcctactattccatgtgacaggggaggagggggaggcagcgggacaggtaacgaagactcgtgacactgccttgtgctatggccatggttggaccctgctgatctgctctgttcacaatacagaactcctaaaagaaccactggaaatttctaaaaaaacaaaaaaaaacaaaacaaaaaaacaaaactctctcccacacatataaacacacacacacacacacacacacacacacacacacacacacacacacattatactttaaaaacccctctcatgggaatcaagaaacatggttccatttaataaagagcactccttgttctcttccaaaatttagtttggtcttgtgacagacaactcagttaactaggtacccactctcaaagctgtttctcaagatttaacggcattttccggtcttctcaagaacacatgctcataatcatgttaatgtttctattcataaatgagattttctacaccaccccctctctctcctcactttctgtaacatccctctgaggcgttcctagctggctggctgataccttggtctctctgagttggtttggtaacccggcatcttaaaaaaatactttatggaaacattagtatattaactttatatccaaacccagctgtgtcacagctgtggtccctctgcccctgtctggtcacactgattctccgtgagaaaaacgttaagaccacttctaacccaactgcttctatgtgcttgctgcttctgctcacagggacctgaaagcaatcctactgtaaagtcctaagaacaagaggcccacataaagaacagggcctctgctaacagcaccttcagagaggcccctcaaacaggaagagcacctgacagactcaacaactttgcctctgccatctagaaagagatatttacctgctttggtgtctttctgggccttggaccctgagcagtaacagcagtctaagaagatgacatagttaagcacattgaagaacagcccgatgaccccggcactgagaaccaacaggggctgctctgtcttctggggactgatgtaccttttgatggcttctaccaggatgctgaacatcagggccacggcaaaaacagaattgccgaatgcccctacgacatctgctcggagaaagccgtaggtgctcttcctgtgctgcctgatactgctggccctcacgccaaacagtccgatgaccatggacaacaggtgggagaggacagcgaaggcgtcagaggccagggagagggagttgcctatgtgtgagaccaccagctccagtacgaagaggacaacactgaccacgcacatgaggatcagacggaagctgcggccagagtatcgccccatggctgccgccgcagctcctttctcttagagattacaactcctggctaactctcccttcagccgtcagcgcctgtcatatttggaaatcaccttttataggctgctataaagtcataaagcagtttaaagggcaattaagcaagagatgtcacgtgagtctgggtttgtgaaaatggaagacactggcttcgggtgtagacttgagaattgtttgtttggatgtgcttaattgcagggcttcaagtctttccttcctgcgggaggttacccagagccagagcctctccagcttctgggagcgtgcagtaatggctttaaaaaagcaagctatttggcatcaatggccatgtcttctctcctaggtgtgtagttctgaatgcaatctgtgtgaaatggaacatgctagggttgtcatcccagagctatgacaagtaaaaggtcatccgcattgctgtgcccactgaccaccatgtaagctacccccctaccaacagtctttgtaagaaagacaggaaagtaattgccaatggtcaggaaaggttcagaccttgacgctggaagagctagtgggtgacaagctgtttcaggaagagagccaagtgatctgagctaatgtgtttgggattctcactataaaaaaaaaatcttatcccttaggcactcacagcttttaaagcctattagttgtcaagtttctaaactgacagcagcctatattgcttgcaatagccaccaactatatagctcttttgaattgaaaaactgttttaattacgtttatttggtagttagcatgcctgtgtcagagaagtacttggtgcgatgtgggttctggcaatcatcttggcaggaatgacaagctaagagcaaaggctgtttgaaaatgacagagtagcaatgtctgtctccctagtgattcttgatgctactatggcaggttccatggctatgtgacagatgactaataaccagaatggggtgatctttccacagctggtcttcttctccttggctgcttttatgaaatattctgcactggactcaaatctgtcaccagcagtccaatgaattgttcctgctgtccaattcccacaaaccttcatgtatgtgatccactggcacaatgaaactcattttaaagttctctcatgaatgactagaaattactaaggtgtgtaacacaggtgccctagtggacccttggagcacagccaggaggctatatgccttgttgtcttttgctgcagtaagcactgggcaagtgactacttttgtgactctaactcatagcctgtctctgaattcataggttccacacctgaagattcaaccaaatacaactgaaaactacatttgtaaatatagcaactatggcactggatgttagagatgagccagagataattttaaagtgtacacaaggagttcagattgcatggaaacactgccatctatgagggaccggagcactggcacactttggtggtggtggtggtggtggtggtggtggtatcctaagaccaagtcctccataggttccaagagatgattggtttctggctgtcaatttaaagcaaatggttcttacactatcttaaaaagcaccagcgcttctcattttgatagtccatacccactacatagcacaagatgaccttagactcatgctcttcctgccttagcctctcctgtgctaggatcttagatgggcgtcacacctgcaagatcagcaccctttaagacatggagtttggaaaaaaaaaaaaaaaaaaaaaaaaaaaaaaaaaaaaagaagccgggcgttggtggtgcacacctttaatcccagcactcggtactctgtgagttcgaggccagcctggtctccagagcgagtgccaggataggctccaaagctacacagagaaaccctgtctcgaaaaacaaaaacaaaaacaacaacaacaaaaaagaagacatggagtttgaaaaggttttgctatcttagcagacagacctccaattttagaaacaagccaacttatcagacatcatttcagtgaacaattcctatcttaatgaagctagagttcctttaaataatgactttaaaaaaaaaaaaaaagagagagatctctcccactcccagatgaccctgggtcactgtataaaatatagtgtgctctacattttctttctgtcatgaattagaaaaacaaaacaaaaaactttccctttttagtttctactggttttcctccaaagcaacatatacactttttaggggacaaactttattttgactaaagccacatatgggcaggaacttgcagctgacctggtgacatctgtaacaactatatatgatgtgctaggcattgttctaaggccttcttctacacagtaagggaacccaggtttgcacttgtctaaggatggaagagtaagaggaaacattcggaactgccatagcccgtgagaaattgattcagagcacaagtatgtgactcagatgggcatgctatgtttacttccagtgtgtgaaggccagagtccaacatcaggtgctctacaatttatttttttgagacaggctgttactgacaccagagtttactaacaggagagactggtgagccggtgagttcccggaccctcctgtctctgccttcccagctgggactagaactcaggtccgcaagcttgccctccactcactttacacacttcttctcagtctgcgcacttaacctgcaccttcctggggcatttcctgttgctcacagggagcacagctggcctttgcatctcactctcttccctctgttaatactgaaacctggctcatccttctggcatgactcacaactctaacctcttaaaggctttccctggtcctcaccctgggaaactgaactagaaataaagcgctatttacccggttgccagaagatggggcaggaggatcacaacttcaggtcagcctcgaggcacataccacaaagcctggtgacctgggctcagtccccacaatccacatggcagagatagctgactccatcaaattgttctctgaccgccatacatttgccttggcaagcatacactcccccaccaaataaacaaagctttaaaaaaaaataaaaaagaatgtactaagaaggctccaaatgaggtaaaaaggccttccaggcaaacaggcatataggaaatacagtctgcacgagaagtgcagagggctgtgttgaattgaagcacactgaacaggtaatgagccagattaggaaaggtatttacattttggtctataaatgatgagaactataaaatgacttcagggggaagaaaagctacctgaataaactactttggggacaacaaaataaccccagaaaatgtggagactggcgtggtggtcacgcacctcagaaggtctaagccctaatgacaatcaaagcaacagcagcagcagcagctgcctactttgtgtcagccggacaaagtgtgtgctgcagggggaggctgcctgggatgactcagggtactctgtcaatgttcatcttccaagcaggaggaaaggcgctacggttagatagaagggtgaaatgagattcaggggacatgctgacctgagatgttgatgaaacacacatcataggagagctcatgtgtagtttagagctccaagctgctgataaccatggtcttactggtctaataatgccgtctgacactgtgagaagactaacattgctgattaaacacaagtatgggaatttggaacaccaatacctaaggaggtggccatgaagaaatgccaatgagagacaaggtttgatggggtaggtacacaacaggcctcaggaatccgttaaaaacaccatcagaagtaccagtgtggtgagacaagaatcagacatggacaccaggcttgcagggttgcccttcgtgacctcaacgagacccacccaccatggtgggaggacagggaagtgcaatgggagaagagaggagggcgactccttctgagatgctggcctcttgacagtcagggaaagtgtacccctgcctacctggctttccatgaccaaccttgtgtgtaggatgaactgaatacataaaatataattagttcatggtatttattacccaggatgtttacagaaaagtatttcccactgttaatttaggcataagaatagctgtttttatctcatttgatttctttttagaactttaaaaaaatgaaaaagaaaaactgcatctgaaggtattatcattggtttaaaaaaaaactaggatgggcaagtcttctgtgtcgtccatcagtaactccgaccaaacaaggtgtagaacttggcagggttcttgccacagacacacatggctcctggctgcagctcacacagaggggtgaaaggaatacagaggcttttggctcccatggacggagcgccaggttccacatcctgatccctggaattaagagacaagaagtccgttcactcctgctgcacactgcgtccttctcagtgcagtctacaggtgagggacatttacctggcagttgtctttttgatccagtcctcacagtcaatttccccacagaaaggaatttgtgcaatctaataagaaaagacaaaacattctgccatcataactctcagagaggagaacttgttacctttcaagcaaaaggggaaggtatccagtccttttggggcattggtacctttgcaaacactctgggaattttgctcaaaagtagatgggagaacaaagaatggtttttccaccatccaaaatccatactcatagaattggacataactatctctgctctaacacactgagtgcctctataagctggctgtaaagtcatgaactctgcagtagatcctcttcaggccatgaccgtggcccgagttacacagctggctgtcaggaggatggagggagatgacgaagagtaaactgatttcaaggtaatgcaacagtaacagccaacagtcaggcagacctcacttgatcccacatgtctaacccattagaggtaagtgattaactctaaagaacaaatgcttgtaaaagacaaaccattttttatcaggaaaatcacaacgaaacttcaatcccagggatcaacatggtggaaggagagaaccagcccctgccaagctggtctttgacctctctctgtgctatggcatgcactcacccatgcagtagatgcaagaaagataaggggtggttggttgagagcagaggtggcggcagtgctgctccccaacttttcatgaattaaaattaagagtcacctgcaaggatcgagagatccaactcctcatctatacagcagtgtctcacaaataaaactaaaaaggtcctctgcaaatccttcctgtgcactgggatctagtgaacatgtttcagaaagccttccctctaagacgttaagggcaaacagaggaggaaattacagaaacaggaacttcttcagatggaccttaactccaaggaagagcaaacgctcataatcaagtctcttatgttcactcggtgaatgtgccagcctaatttctgaaatttaccaactgctatttcaagattatggaagtaatacatttctaggtgtgtcctgcaagccggagaatggatggagagaaagcggcagagatcagtaacaggacacattcagagaagttttaatacaaaaattctttgtgccatgagaatggagacaaaagactcaagatccaagccaaaattattcccctgtatgagagttgcaaacccttaatatttgcaaacaaaatgaatttaaaagtccatttataaaatggtgtgtaatatataaaataataatgggtgttagcacatgaagaaatttgtatttggactcataagcgattctgtagaatgtggaggcacagggacataattctagctacttaggggccaaggcaagagggtccaaagttcaaagattttagcttactaacgagtttaagcctggcctggataacttagtgagtctgtctctttactatgaaataacaagtaagccaacggaagggctcttgctcagcgtgcccgaagcctgagatccaacccctagcaccataaatacagccaatgaactaaaatgaaaagttcagctgggccgtggtggcacacacatttaatcccaacactcgggagtcagagagaggcaggtggatctctgtgaattcaaggacaaacagccttgtgtacagagcgagttgcaggacaggatccaaagctgcagagaaaccctgacttgaagaaaaaaaaaaaaaagggtagaaagggtgaacttgaaaaatcagtgaacaaattagactccccgcccctttacacttatgccagtaaatacaggtagagagggaaaaggcaatgctttacctcatgtaagttctgaagacctttcctctcctagtgaatacacctttatttacaacagcctcacaggctatctgatcgggtcagcagcacacctaagataatccacaggaagcaggatggagggagggaggaggcactgactgaagacaacagacaggacctactcactttcctatgtacttctttggaaatgaaactaaaatacccctgttccactataaatttcaaatccttacagaaatatcagaataaaatatacgactcgccagcactttgtgaatcttggttctttgaaatcaagctaaaagcaatatgcaatttctctaataaattattctaaaaaagtgactagtcctatcattataatgaaactttttaatttaaaagtgaatgtgggcaagctgagtctgctggcaaagcctttcaccccagctcctcaggagactgagcaggaagattacaagttcaagggcagcctgggctatagagtgagttcaagggtcaacgtaggcaattcaaagagaccttgactcaaaataaaaagaagtgggctggtgctgtgctcagtggtaaagtgcttgcccagcattaccatgctgaagccttagatccaatcctcaacactcaggaagaaaaaaacaaaaacaactgaagcaggaagaaaataatgcatacataaactgcacaggcaggaacacccatgatagaaagaggccacacaaccgctcgtcttctattaaaagcctgtggcatgagacaagggcacactacagaacactgaaaggtgaagggccagaaaaacagtaagccaaagccagatgctgaacaagtggggagctgaaaggatgtctgagatcatctattttacagatcagtaaagagccagagatgaaccctctgcaccagcaacaagagatgtgttattaggccagcactgttaaaaaaaaaacgtcgtcttttattctcaacaaggggttttttacaaatctgagtgggaagtgcactaaactgtggtagagagatctaacttctggcatctgtctgattctatgggctaattcgtttagactctggcctgtgcttttctcatttgtaatctggagacacacgtacaccagaatactaaagtccataagtgattcactccaataatacataaagctgaagaatgcacaatccttttatttgactggcttacaaggaggttaaaacagagcataagttgaaggagttttaaattaagatctactggaaagtggtagaagtagagttcagtggcacagcgctgcccagcacaggcaaaaccctgggctcaatgcccagccctgcaggaaacaaaacaaaaccaagaaaacttatttggaagtttcttacctttccagaatctagtaccttctgaaagtcttccaatgtattggatacaaccatatgagttttaaggtcttcagaagccctgacaaaataaatcagaaaatacataacttttcttacaaatatgattttttaaaaaatccccagataaataagattcaatgaaatagtaaatgaaagtcagaagaacgcaatgtgagtactacccagctaccttatttcagtatcacctcaagactacacataagaaacttgccatgcacagaataggcagctgctacttttgttactgctgctgaatggtcctggctcccacttatataccacctgtggaagtctgatattcttcaggcccttctggtctacatttcccttctacaaaatcagaaaaataatattgtagcaggaagtatatagaactgcccagtaatgaactggaaattacagccagttgtgagctgcttgttgtggctgctgggaaccaacctcaggttctctgccgggactatacccactgagccacctctcctgtcatcacagggagcttagaacactatagttgctggctgctctgcagatcactataattagtctctcagggaaggcactgatatttcctaaagtttcctggattctcccaatctgtgcccagcgcttaagaactaatagcttaataaaagggcccggatctgaagttaccactgtttcacggggaacacacactttggaaaacccacaagtcaaaactacaaatggaataagaaactaagtggccctggagctcagggagcagactacttccagttgcaataatccccaaatccctcatttgcatctcaaactttaggtgaaaactgaagaaaggaaacactgtaaaccacagagctaccttgtgaaaaggttaagctggatgtcttccaaaatctcttgaagtttagactcagcctctttttcagcaattgtcaacttctctccagtgtctcgtctgacagctacaaactgacagctcttcatatcacgtggccccacctcaagtctgactggaaccccctgtaaaacaaaacgggcagttgatggttgagactgtgcatgtgtatctgactatttcatggttttatctactacaaatcctatgaaagttgaaagcaatcataacatccattagagaactttcttcagtccagaaggaacgagtctactgcctgtgttgtcagaactgagcaatctcttgatggagaaccacccgagcgggcattcccattcccgcacaaatggcctgtggtgcatggaggaatacagaggcattctgaaaccaaagatggccccaaggcatgagggttcagcacactcacggtagacatgtgctctggctgggatgcctggggtctggacggaactattacactcatgagcatcacctgcagggctggttagaacataagagaactattgctctaactctaacctgctgcctcactattttcttggaggtcaaggatgggctgagagtcacagctgatggagttactatgtgctgctcagactgctggctttgggataaagtctgagaaccaccacactctcagacttccatgaggaaacttaagaggtagctacatgcaagtttaagactcctgcatatccaagtcccatgtattccaatctctgagggtactaacgcccttgaggtccatggagaccttgcattgtagggtctggaaccatatctgaaaaacagtaggtcttaaattttagtggaagatcctttacgacagtggttctcaaccttccaaatgctgagatccttctaacacagttccttatgctgtggtggcccccaaccataaaactattttgttgctacctcataactgtgttttttgctattgatatctgtctgatatgcaacccctgttggggacggtggagaaccactgctttaactccgacatcaagcaggtgcttctacagacagacagacagcatagacatcaagtagtgctcaagtcaaagacaaagggaaagtgaagtgagtgacagcaagcccactggacccttgtgaaacagggtaccagggacaggagtaacagagacagagccatatcttcacaagagaggggaaaggaggaaaggggagtggagggatttggatgtagatggcatttttaattcattttgatcaagccaacagcaacagtttctcctttaacatttcacactcagacacatatgaactggcttcgagaagcagctgctggtatccacctgctattcctaggtgaacaaaaaagactgcaaggaagacaaattacagagaacaagatagtcatcttcaggtcttccctgaaggtagggagcatgtgaaagagccagtatgaaacacgaaagagaagcagggtgagcagagcagcagcgctgaccccagcacaggcttgcctcaggagccacttttaaagtgagatgacaaatgctgctggctttgtaatctgaataaccccaacacatcaagcattggttgttaagttctcagctaccatctcagaactcgccccaccctactcctcctaattcctaggatgagatgatattctctattatcatagctaaaagaaaaaaaatagtaaatgctaaacgtttataaaatggaacaaagggcataatacattacctaacaatgaagctctgcagtaaatgaaaatacaccacaaacattaaaccagaatttagataggctttgtatgcacagagttaaaaacaacagcaaacagacaggcagctatgcagaacagaactgcagatgtggagggaacctgtgaacactccatcatcacctcattaggccagggacggaattccagacgtaagcattgcaacacacccaccaaatgaggcttatttagtatatacaacacttcaagatcatttttattctaatgtaataaaaaactggcgtgcagaaaacttcagggagacagggcacagtgctgggaatcaaaggctgggccaagctactcacttcctcaaccaccacagaaattagtttaataagcacacactctagaaacccccgttacacgccatgacctgcactggtgctcagaacttacagctataaatatgagatggcaacaacaacaacaaaaaatccttaagtttgcagagatccagatctccctccccagtgcaggatcccagtgtaccttgagctcccagtgattgaatttccagcctggagagtagttatcacgtagatcaactcggactcggatgttcacgccaagtagccgctttcgatactcattgcattttgccatcagagcctctctgtcttcttcagacagggcatttgtgattccacagggaattactaccacctagagtacagccaaagacagaccacatacacataaagacatctacaataacaaatcatctagatcttacaataatgaaccacacagaagttaaaacatgccaatgacagtcttttaaatatagatacttttactacaattaaaaacatggtgctggagagatggctcaatggttgagagcacttattgctcttacagaggacccaggttcggtccccaggacccacctggtggcttgcaaccatctgtaagttaactccagggagttcaactcctcttctgatctgtgagtgccctagcacacatgcatgtacagacacagtcaggaattcattcatacgcactagcacatgagtacacacacgtacgtacatacactctccatctctccaaatatttcttgggaaaactcagcaaaatcgagcagagtttaggatgctgggcagtggtggtggcatgcccttaatctcagcattcggggggcagaggcaggtggatctctgaatctgaggtcagcctgatttatagagcaatttctgtacagcctggactacacagagaaaccgtgtcttgaaactgcccccccaccctcaaagagtttaggtatttaagtctgtatgaagagaaaaaaaaccaaggatatgtttgttaccctgtagttttctggggtctctctgcctgtctctctttgagatagaatctcactatgtagctgtgattggcctattctttctctaagttctatatatagaccatgctggcctggaactcagagatttgcctgtccctacctttaatgttctagaattaaagatgtgtgccaccatgtccagcatttggtttaattatgtgtgtgtgtgtgtgtgcgtgtgtgtgcgcgtgtgtgtgtgtgtgcgcgtgcgtgtgtgtgcgcgagcgcgcgcgggggggggggggggggggtgttgtgtgtacccagtgtggctaaaggcattggatcctgtcttagtcgaggtttttattgctatgaagagacaacatgaccacagcaacccttaatacaggaaaacattaattgggatggctagcttacagttaagaggtttagtacaattatcatggcaggaaacaaggcagcatgcaggcagacatggtgctggagcgagagtccttacatcttgaaccaaaggcaacaggaagtcaactgagacactggggtagtatcatgggcatattatgagacctcaaagcccgccttcaccatgacacacttcccccaccaaggccatacctcctaaaagtgccactccttttggggaccattttctttcaaatcaccacagacaccccctgcagctggcattagaggaggctgcaaagtgccacacatagtcaccgagaactgcacctgggtcctatgcagagcagtggtatgctctcttacccaccatgctccagtccccagtcttttagccatgaccacagatggctggtgtgacctgcttcccagtcttgcttggaggtttggtttacagacatttgcttttcagggctccagcatgaactggtttatggctaatatatatagccctcagtctgttttctaataactaaatcttaccacaaattaatctgtgtaatttctgttccaaacatgtactaagcagttaaatatcacttaccaaaactacattcatttttatttaacctactatattttatttaaacaattataaataatttcaaataattatttctaaagaaagttttagggctagaaaaatggctccacaattaagaccatccacacggtggttcacaaccatctctaactcagttctgtgggattcactgccctcttctgaccttggtcagcaccatgcatgcacacagtccacagatgtacaggcagacaaaacatttactcacaaaataatattagtaaacctaagtcaatatttaaaataaaagttttcaacaaagttaatttttaaatttcttgagacaataaataatacaaatgtacacatacttacacaatcagagaaatctaccctttcaaagtttctttgtaaacatggtctataacatacaaaaggaatggtagaaagaaacatttccctcacctgaacacaggctacacggggcggtaacactaagcccatattgtccccatggaccatgatcatcacaccaatagtccgagtcgtcaggccccaagagcactggaatgcaaactgcttctctcctggggtctttggatcttcaaaaacaatttcacacattttggaaaaattctggcctaagtggtgtgatgttgctccctaaaataaggagagaaacacaagctttaattttaaactattattcctttgaaaataatgacaagatcacatattttagaataccactatacatgctgttttatctccttttctgacattaatgcttacatacaagtatgactgacatgacaagagagaaggattggtttaaaaaaataccagttttgctcgggcagccccttctgacagaactctgtaaggttctgctcatgcctagggattcaggaaggaaccccaacttcactggtgtgcaagtgcagaacaggcctggagcacatgttaccctcctcttctcctgtcttttggagacacatggacctagaactcactatgagctgaaggtctccaatacctgatcctcttgcctctacttccagggggattacaggtgtgcaacgagacacccagtttaatggggtattggtgatcaatgcatcaattagaaaatggtgatcgctggctccatgcatgctagacaagtgctgtacctgcttccccatgaggcagtgcgtgcactgtgtgatgcttaaatcacgttacacttacctcaaggatccatcatttcgttctggtaaaaactttcaaaatcccttgagtgttttaaaaatttacaactcattactagtgtactactgtatcctgtataataactaacaggctagaccatggagctcacactagcttcagactcaaaatgcttggagcccaccatcattagccatagaataatattctgctcctacagaactaaaatttaattcctactgaccaactcacattctccctaacttctatgtaactatgattttattcttaagttatatacaatcattttcttagtgttcacatatgattacaatcatacaatactacgtgtatttcacttaacaagaacatcttcagtttcatttatggtactgcaaatgacagaattccttgtatggctaatattccactgtggatacgcgcattgtttttaaccaagtgacgctggctatcaggctgcaataaacagagtgcggatccttccagtacactcattttatccatcaggatctacctctgagaaaggcattgctagatcacatactagtgattttagtttttaaaagcataatactgttttctctattggctgtccaaatactaataaagtagcaaaacccgctggagctgccatgggctgtgcttacaactgccatgggctgtgcttacagctgccatgggctgtgcttacaactgcatgcggccgcagcactccatacctggatagcacgcccactggcagatatgaaggcttctactgtggttgtatagtctcctcctgcaaacttctccttttcagtctttcttcctctcacaacagggattgccaagagctcttcatacactcgagcatataactcaaggatttgcatgacctgttaacaacatttatggcatgtttattcatctcaaattgtgaaaaggtccttcaaacaacaaaattatagaaaggttaaagaagtcaatgtgtgacttaaggaagatgtccaacaagaaatcaatgggaggctgagtaacatttaaacatttaaacgcatacaaattggaatgtaggagacaactgcttgagagatatagagtaattagattgaaaaccttagaaaatgattaatttcaatcatgactgattttctataaattaaaatctcactgtttaatcatacaaaattttaaatagtaaatttactaataaaattttaataagcagcctttaaaatctggctactcttggattaacttcctattttcaaataggtattacacagcataagccaaacaaaaaaacagtgcctgaagaaaaacacgagcatagcagaggactgttcctacctcgtcagctgcctcctcgaaggtagcaaaggcactgtgtccctcctgccacaggaactcccgagtgcggaggaaaggctgtgggtgcttaaactcccagcgctgcaggatgcaaggacaaggcccgtaagggtagagaatctgcagtttttattagcaactttacaaggtcaatagtcaaaagtaatgagtgtgatccaaaatactctgaaaactgctttcacattcaaaggaaagaaagcatgctctacactcaaggggacacatgaaactggtgacagactaacaccttaccaccacattgcaccactggttgagcctgatgggcaggtctctgtgggactgcacccattttgcatatgcaggatacattactgaaagtcaagaaaatatagacatttataacctgatttcttccttaaggctgacaagagttaaattagcaatgtaatgaatatgaattaaagtgtttgctccagtatttgtgatggttcactgaatgacattattatatatttcacaaatcataaccccatagatagacaaatctacctaacatgatcatacgttgtgtgcttcacctatttgtatataagtactgattgtttccatgttctatttgggtgaggactagtatattccgtgttctatgtaaaattattttcattctttatcttgcttaattctgtcctttgacttataaatatcattatcaaatttaaagatgttaatgttatttctgaattcagctatgcagccgaatcagaattttttacattcagattaaccatccaatgaagaaaactcttgacatgaactatgacttgtctacaatgtaccatcagtaaactaattgtacataaaaaactgataatttgttatgagaaaaaacaagaataaaactaaagtcataatttcaaaagtgcaaatataaaaacacactagaaatactagataatgagtacactaactttgaagacaggtaggtaatcactgtaggaccatgctaccaagcccaaagccccagaacctggtggcacgcctattcactaagtataattccagggaaatcattctatcagctgacagctgtctccaccttctactctaaaatcccttgggaggtgagcatggaggtgcacacctttaatcccagcacttgggaatcacatctccgagagctcaggttagcctgatctaaacaccagggtccaagtcagctagagctggatgtgagtgagaccctgtctcaaaaacaaacaaactctacaggaatataaatctaaataagtgaaaacatcatttgcaattttataaccaatctcaagaataattcaatacattccctctgagaagttgtaacactaaacaaatagagatgccattccaaaaaaggaaaactactttcagctgtggcaactgtcttcctgtaactcaacaaaatgacagagggaaagaggagaggaaccagtggtatgttttccaggctttttaggaaacacggcactgtgcctttagccacatgcatgcaaaactggagcccattccctacgaattcatggcttaatgtgtaaaaatatacaaaggacctaaagcgtaaagtatttttctttaaaaagaagaaagatgggctgggcattggtggtgcacgcctttaatcccagcactctggaggcagaggcaggtggatgtctgtgagttcaaggccagcctggtctccagagcgagtgccaggacaggctccaaagccacagagaaaccctgtctcaaaaaaaaaaaaaaacaaaaaaaaaaaagaagaaagatggacacagaactctgtaacaaattgccttaatataaaatctatgtaattgaactttcattctgtcttcatctttcaataaattctgtttggccaggaacaactctaagcatgagaaacacgagactcaactccagcccgctaacagctcagcaagctttctccagtgctgcaggcgcgagctcacctgtttcactagtaggtcggatggcaattggctctgccagctctgtcttaccagatcttgtaacccaagcaacctagtaagataaaaatgattgtagacacagttttaatggccttttcgaagcacataagtacatgtcaactttcaggttttctcagtatcaactaaagaaagttcaaactcttgctgttactagaaggcagtggacaagtcattcagtgagaggatgtgactaaccactaaccctgctttaagagtagaagaaacaggacattgtaaagaaacctatcagtagttaaactctactgaagacttaattttcagtttgtaagagaaaaccgcaaaaagaaaaagcacatcttttccagtgtacctcgggggcaaagtcctcaatgtgactcttttctttctctaaagcagcctgagacacaaatatggggaagtagcagttctcaacaccgagtttcttgatctcagtatcaaagaagtccttaatggattcccaaatggagtacgaccagggccggaggatatagcagccactcacatcgtagtattcaatcatctctgactttgtgatgacctgtcaaagagaaaaacccagaaactgaaccagtattctagcacaaaggcaagagtgtgtgctaatcaaagttcctaacaccctcatttatttatttgtttattttggtttttcaaaacagggcttctctgtgtagccctggctgtcctggaactctgtaacccacctgcctctgcctcccaactgctggaattacaggcatgtgccgtcatgcctggcttggaaacaccctccttaatgtggagggaaaacacttgcctacatgcagaggtaacacataccaggactctaaagtctaaggacttagcactgagccacacccttagccttcctttatttatttttagtttttattttgagacaggtttcactgtgtagaccagctagcctggaactcagattctctagcctttatcttccaagtgttggggttacatggtgtgccaccgtacgtgacatgagagttattataatgggcatcctgggaggtggcgagcagtaggtaaaatgtctgccttgcacatcttctggcctccacatgcatttatgcaaacgtgcacatacaacatgagcacgagagagaaggggggggtcccactgttacaactgcctttctcgctagacttcagaatcagaacctaaagccaccctgaaaatgttaacaacatcaaagcccactgaaagcatactcacttgggagtaccattcggccagattttcttccttttttgcttcaagacccaatctgcagacatgcaaaaggaaatgtgagccctttactaggcaatcgctttaggctgtgtcttcgtctgttttctgtactggaggacaagtcagctaaagagcagaggcttacgtggctcctggtgctggaggctcaaacactggggtgtgggtatcagtcctgtgggcggagagggccctctacaggcataacttgtgctgggcacggccagcgaggaactaggaagcagctagcaggtgactcttcctgctttaatgaaccccatcactggactgttttccccacctctgctcaacctaactactacttcggaggctccacctttacttacgacgacttccaccaactaaggacccttttcccagcatgtatgtatactgtgggatacattcaaaccacagcaggctggactgaaactaagagtaaaagctcaaaaggggagtttttcctaattttcagtcatttttatgtttgtatctttttatattcatttccacaataatgtttttaatctggaaagttgttcagtagttttttaatacagggaagtcttcactatttagcccctgctttgctgtaacttgatagatcagactgcccaagcttgcagttttcttgcctctatctctgaagcactgagatcatgggtgtgcaccatcatacccatccaccataaaaacagctttgcaaaagttggtcacatgttgatcatgaaaactgccaaggctaaacctgtttagattatgattttttaaagaagacatttatttattttattataaaattctttttcaattaaaatattatttggcaaacacaaaatctgttcacatatagtttctactaaaaaagattttgatcaacacaggtgatatcaacaactagaacaatcagtgtctcactaaaggtacaatgtaaaaagtaataaaagcagcagctaccaagtatacacagacaaaccttttgtttgtcctcaatttcctacctacccctcaacctctattccagggaacacttctttcctcaaagccccaacccttagctgggcctggggcttgcatacacctataacctcaacaggaatgctgaggcagaaagaccgagttcatgtcaggcctgagctacacaggaagacttggtccccagcccccaaatgacaaaagatctgcctattaactgtgttctataagaagcacatgtttttgcaaggaaggctttatggtcttagatttgtagtgtatttacaatttcattctcttttctccatgagaaactgagggctacacacgggtattcagaagctgaagggaaaagggagcctctaatcttttgtccactgctctctacacatttactgaatgctgagtcaatacgcaaaaccaggagaagctgctgtgttctctaaagagatggcacacaaacatgggaggcaattaaatttgatattcagcaaagaaatctaaaaatcaaactatctcagtaagagcattttttgtctaggaagccatgacagaaagcctgtcacgatctgtttagcctatacttttggaaggagaggcacactgttcaagcagacaggaaaacactgaaaaggacatgtaatctacagtctagtctttaaaccagccgcttcatagttaaactatcaacttcaaaataagaacaaacttcttatttacttcttgtgaaaaactttggaaaaataaaaaaacacaatgcaatgtatatttaagctgtagtaaaaggaacatctatacatgtttacacacacatagctattctctcagtagacaaaacaaacgagcattggtttagcacccctcacccagcacatctgaggtcacaactgctgctgactttagagctttctgaactctacactgtctgtctagacccaagtctgaggctctcataggctcatgaccatttgagtgtttggttctcagttgatactgtttgggaaggattaggaggtgtggccttgttggggggggaggtgtccctggctttgacatttcaaaagcccatgctaggcccagtctctttctcattctgcctgaagatcaggatgtaacctctcagcccctgctcaataccatgcctgcctgcctgcctgcctgccacaccatggtcccagccaaagtgatcatggatccaactcttccttccgtaagctgccctggtcatggtctctcttcacagcaactgaagctgtgacagtgatgaccaactcatttccctgtggaggaaacgaaacaggtggaaaagtatagggacttctgaaagagagcaggcatgtactgcctattttaaacgtaaacagaagttaactgctgatgttagactgtgagcaatctgccttgatgataacaaaccaagatctgcttattttaaaaacaaacccttgagaactgaattcacgcggaagcggttggtacctggtctgcttcttaggcccctgcccttcccctgctccactcgatgacagcccaccgccctggcttttagaagagtctttccctgggccatcattttgtttctgaggcttattctgcttttcagacttattctctttttctttcttcttcttatctttgtcttcagacccagtagcagacacaggcttatactcgattcctgtcagggacttgtactgtgccttcagctgaaggagttcttgcacagctggatccacttgatcctttaaggaaccaagaggacaaaggaggacagcattcagtgaaaaatcactgtcttggcatacattaacaaataccacacccagacttacacacagttaagggcaacagatgtagacacaaaatgctaaaatatactaagaaaataaaagaatataaaagggacaagactagtctagagtactagaaatagattatgcagtgcactttctaacagctacacatggttatgtaaattaaacaaaaaagttggtccacactgaccttagaggccttttcagctttaagttttcgaactacttctccttgacaagccactctgtcaaacagcgctttggcttctgttgtctctggaccagcaggctcagctttgctggcaggacttggctgtgacttctgggatgctgggggctgaccaggtacatattccttcccagttttttctttatactcagctttcagggacagtaagcattctacagcttcagttactttagcctgaaaatatagaggaagagaagtatttcacaacatatatgaatatttaaataacatttcaaagtctttagtcattatcacagtatacttagccatctatgtccagagatccaagtatatttgacttttggtccaaagaccaaaaatatttgaaaacaaagaacttcatcataatacatactcccacaaaaaagaaaaaatgggcaaggaaagaaaaaacctggactaataattttttttcaaaaagcctttcaaagactcagttgagcaaaatgtattaaaaggtacaggtggcaaaacactgctctagtctgaaaatgtacagatgcctcatgatcatctcctcaacaggacaactgtttacgtcctattagtacagtaagtaatccagagaggactctaactaagcacacaaatacatagaaggaaatgaacagacaatatggaaataccatgctactttatataagcgactcgtgtgccttcagctttgttatctgatcgagttctgaaaccagtctccacagaccactttcaaaaactaacaaagaaatgagaaagtgtgctgaagtcttaaatttcccaattacctgcatatttcaacataaacagaaagggtgacacactctaccacagaagacagcagcacagggaaaggactcgagctagatgcctgacctcaaaatactgctacaaatcaacacctgactgagaaccttaagacagcaaccacacagtgaagagcaagtgccttgcctcacggatgcatcacaccccccgcccagggtagcagagtcaacgtgacaggagcaagggagcacacccaggaccagctcccagccatacaggagcagcaccagagctgcatccaggaggtggcaattcacaccttcttggactgctctgttttcctacctacagactttgtggtctgttatcccaggaacttgtttgaaaaggagaatctaggtatgtcggtggatgtttataattgcaggctatggaaactgaggaagaaggatcctgagttcaagaccagcctgaactacaaagtgtggctttgactcaggaaaaaaaggggttgggggtgaacaaagagaagcttagggaaggctgtctgtattcccaacctgtctcttgttgctattactgtagaattaagagttatttcccaatagagtttctttcttaagaaaaaggtcacaggctgggcggtggtggcgcacgcctttaattccagcactcaggaggcagaggcaggtagatttctgtaagttcgaggccagcctggtctacaagagctagttccaggacagcctccaaagccgccacagagaaaccctgttttgaaacctcccacccaaaaaaaagaaaaaaaaagaaagaaaaaggtcacatttaaaggaagaaggaaagaaagagaaggagaatccagggagagggacagaagaaagtggaagcaagggcagaacaaagaaagccagggcatcatcagctaaaagaatgaaaatatgaagaaaaaagggacacccttgtaaatacatctacaaaaaactttttgaaataagttccaatgatctaagttcaacctaggagagaactgactcccacagtagtctctaacttccacatatgccccaattctctctctctctctctctctctctctctctctctctctctctctctctttctctctctctctctcataaaataaagtttaaacattcatttctgtttgaattcaaatggtacagtttcacacagaaaatttcctagcttcacaacataaaagatttttttgtttgttttttggtttttcaagacaggtttctctgtgtagctttataaaccagggtggcctcgaactcagagagatgtgtttgtctctgcctcctgagtgctggtattaaaggcatgcatactacctccctgctataaattttgaaattttatagaagagaaaattaaggtaaaccatctattatatcattgaataagatactctattctaccaagattacatgtataaataatacacacatacttccaaaataagagccaaactctaccaactgctgtgcacatttcctgcatgattcagaaagtaggtatatggttcttgagggaaattagaaccattaacaaaagaatgtatcatttcaacacatacttactcgattccagatgccatgctaagtattctgtcttacttaattctcaaaatacctttcaccctcatctacatttaacagaagcagcaaatctcagaaagtaagtgtccggatccaagtttacatggcaagaggtagacagaaattgcatgctgtgatcttgactacaggtcttcatagcatcacaaacgcatggaacaatgttctgagtgtgcacaaggggctctctatcgagacagtcctgcagtggttttgcaatgaacttgtaatggtagccacacccccttaggcgtggcctcaggctgacatattcggcaagcgctctggcggtttttcgtatttttctgcgtaatcgttccccaataaacacccatttatatttatcttgggtctagtgaaataattatatacccatcttcacagtccacccaaaacagtagcttcagtgggtccctgcctcaaatgatgagtcaacatctggcaagcacacaccagcacagccatgcacaacacacatgaacacacacacatactgcattattagttgaatgtgtctctagcaatacataatgtacaactgaaggatgaggagagtaaccttataaatttttttctgaattgaaggggattcactaagtgagactgcatgaagtacttccttcttggaacaacacacaacatccagagctaacagatgctcagttcttaatggacaaacattgttttgcgcttatgagatatggatctcacataaaattctactcagtcatcaatgtggactaatagtgacttaagcaatccacacacaatttctctaaagggttcagactgaatctgaggtatgtgaaagtggtcttaaaacggtaattcaaagattgggaaatgaagaaaatggagaaaaacagaggtggtcatcaggtctcatttagaatgcaagtaagtgaagagctatttctgcagcagccactagatggacgcatctcaacattgagaacggtgggaaaatcaaaagaaaactctagttcccttagttatttaaatgctaacaagagaacttttcaagaaaatagctaggacacaccaaattttctgctctaaaaatatccatcttttcaccttagcacatgtaagaaagcaatactcacacacatcagtaataactccccaaagcagaggtttgctcttggtgggtaagagggaatggcaatcagagccagtgatcttccagctgcaggggtgggaacactgaaagcttgtggctcatacttacaagatattgagattaaccaattgaaagatcacaggatttttaaaagtagtatcttctaattagaaatctgtgcttagtaacctaccaaagcctgtaagaaatagccccagaggagtcatgaccagctggtacagcactgcccagaacccagaagtagtctgtaaagacctttagttatgttgagttttcaatcctctttgccctgggtctaaatttcaaacacccaattccatgtctacagcagggaacagacagagacaacacagactaccaagtaggtctggctggtggtgttcatggtttgctaaactgggctgtggaatctgaagtttagtgcctttttttttttttttttggtttttcaagacagggtttctctgtgtagctttggagcctatcctggcactcactctggagaccaggctggcctcgaactcacagagatctgcctgcctctgcctcccgagtgctgggattaaaggcgtgcgccaccaacgtctggtagtttagtgctttataaagcctgtgccatgttatggctgctgtattaaaaaccactcagatactgaatacgtaatgactaaatgtaatttttctaaattttaaaaggagccatctgtgcttgtgctggacctggaagatcaggcacagcctcaacaggaagaacgctggagtttgtgctgtagtttgtggacttgtgcctgcctctgaaacactgactgcccctcagttcatgctcatccatccacgagacctctatcccttcttcccaaccaccctcccctctccattccccggaactgtgccttctttcctcagctctcccagcaaccacattactggtgccaaggacaacacatccactcaggtaggtaaggcctcgaaggcagggttaacggccagtttaaaaacctaggtgatttttcagggccactcaaaggatgggagtcacgtgaatctactctaattggctaaggctgatgatggcatgtctcaaaggactactcgccatataaacaaaaacaaaccaaaccaaaagccaggcacggtggctttcttcaatcccccaccagcagcactggcacctgaacaactatttggacgtgcattgtgagggttactcttcactgccaacctaactggattcagaatcacctaggagacacacctatggacgtgtctgcatggtgttcacagaggattaactgaaggtgagctatgatgagatgggtggaccatcccaccgtcaggggcccaggaaaattaagagaggaaagagggaaagccagatcagtgcctgcactctcctttctctgtgtcctagtccgccaagcgtgaataaatccctgcccccacctcagcgagtcactcgagcctccatgccttacccacaatgaactgcatacagaacccaaactgtgagtgagaatattccccttatactgcctgttgggttatttggtgagagatgagaaccgtaactaataatacaaaagacaaagggcatctctccccacaccatgaacttcctgaagcttaatgggagaggccacagtccttgtgttttaacaagacttctaaaagttctaatgcacacagggccaagaaccatagtttcccagttccatagccaaatgcccctttgtgaactccatcatctgtaaaaggcttctactcttccagaatgtatgtgtgtgctatgctggggatcaatccaagctttacccctaataaacacagacactaaaccaagtgataccttcaggtgtggtggcctatccagcaccccggaagtagaggcaggcagatctctgtgagttcaaggccagcttgatttacatagtaagttctgagacagccatggctacaagagcccttgtttcagaagaaagaaggagagagagagagagagagagagagagagagagagagagagagagagagagaggagagagagagagagagagagagagagagagagagagagagagagaggagggagggccagcgagctctaccctagcctacagggagtgttttaaatatcctttatgaattgtcttctccttcaccattactcttgagcacaaacacatctcacagcaacacaaacacaccacacaggtcacacacatgccacagagttacagtgagtctgtcttgttttcaatgtccctcacctccatgaactgtgaggggttttttccttaagacttaaatttctctttccttttataggtcttccttttgattatgtaactgtgtatggggatgtgcacatgagtgcaggcgcactctgagaccagggacactgatctccctggagctggatacaggaagttgtgactggcctgacacacggaccatctgcagaagcagtatgcacccttaacactgagtcgtcgctccagtctcagctgggagtttactttcagcctcggcatatagcaggcaatatgaaatgttgatttctaggtcaaaatatttaaccaggtagcctacaaactgcttcacggggacaggcgactatgttcaaacagtcagaactcacgggcttgctgaagatgcactgggctccagcacactgaccttaggagctttttcagctttcagctttcgaaccacctccccttgggcagcaattttatcatacagagatctatcttccccagcgctgggcagtgacttagtggaggcgctctgcgctgctgcagagggagggttcccaggtttatactcctgcccagtcttctgtttatattcagcttttaaagccagaagctgcttcacagctgcatctacatcttcctttgccgctttcttggctttcagttcacgaaccacatccccctgagccgccactctgttgtaaaggacggaggactcctcagaggcagcacaaggactcacagcaggcactggtccttctttaggagcagagcttgtctatggatgcagaaaaacaaaagtcaagtattaattcttgtcaaacattgtcacaagcttatatcaaacttagtatttcaaaagctcagatgaatcagctcacacctaaaaaccttatccccacagagatggcagcagtagacaaagggagaagtaagcagtcatcacagcattgtcatcacagtgaaacccaagggaggaagagggttccacaggagcttgtgtctttctctttagaagaggaaagtagtgtaatgtatccactcaggtcaggaataaatcactgctactctgacttaaactggatactaatggctacttatttattggtcatgttggtggaagaagtgaatggcagagtctctgggcagattattatttggtactttcttgtaccacacggtatctggtggagtaaagagatctactgtctagtgttaaatatttattcaggtcaggtagtggtggcacacacctttaatcccagcactcgggaggcagaggcaggtgaatctctgggagtttgaggccagcctggtctacagagctagtttcaagacagtcaggactacacaaagaaaccctgtctcaaataaacaaaataaataaataaataaaaacaaatcaccattaccacacattccagagatgcaacataaaataattacatatgttcttataaaggttaagtatccatttagactgatgagaaaatagaaataaatctgtaagcagtcattcagcattatcttcaacgttttttaaaagttcaggtaagtgtcaattacttattagcaaagaattcattgagatactctgagagaatcagatgtggtagcatacgcttaaaccttgggagctaaagcaagaaaacacacacacatgcacatgcacgcacactcacacacacacacaatgcatcaataagccctagatgagacttcaattttgatagcagcagtctcttaatggagtcaaataacttcaaggatcatcaaaaggaaaccattgagactacagatctctctgacaacaacactgagtacaaataaacactggtcagttgcacttgggttgcttgtagggtttgtggtttcacagcctaaccacacactctttcacagcataactaaccacacattctttgagactccttccacctaaaagtgagtatctgctgccctgaatctgagcagcttagatgtatcttctcaatagtgcacagcagacgcaactgtgagaccttctagactacgcctactgaacacacagttctgctgtttgctgttttgcttcttttcttccagaccctcggttctgaaggtctgagctgttaatgtaagtagcctccctaccatgacactaccatgctggaggccatcgccaccatcatgcggtactcaggtgaatgaattactctgaatgtttagctcagtttagcctttggtgatcacagctatgatctaaatgacaccaagcaagatattcagcggtttgtgttaagtctatactctttaatatcagccccactactgaatgtatgacagacattcaaaagcacttattggtcagtatctttcagagagtgtaggtagtaggagggtgggtgccacatgggactagggagagaccagtgcacagatcccaaggtttctgcagtcccttcaaagaggggctggaaggtcatagctattttcattataatattatactaacgtgtattaggcctttagtgatctcattctcttaatgagtgtttagttcaagttttcagaagtgcttaagtaagacattaaagagatgtgcaagctgggtatggtggcataggctttttatcccagcggataaattacactgaggtcaaggccagtcttactaacacagcaagttcttgaccaatcagaactacatagtgagaaccaacaactgtactcccccaaacaacaacaacaaaaggattgcaaacttcaaaatgacactgttctttcaacaacaagctttgttctggaaaagagctatttttcataaaaaatggtattcttgaaacctggcataatgacatatatccctgtaatccaagcactaaggaagttccccaagaatgttctgtcagtctaggcttaggcagcggtgatttgtttttatttatttatttattttgtttatttgagacagggtttctttgtgtagtcctgactgtcttgaaactagctctgtagaccaggctggcctcaaactcccagagatccacctgcctctgcctcccgagtgccgggattaaaggtgtgcttagtaaaatcatgttttttaaaacaatgtgttctcaccaggtggtgatggcgtacacctttagtatcatcacttaggaggcaaaggcagctgggtctcaatgagtttgaggtcagcctggtctacagagtgagttccaggacagacagggttacatagagaaaccctgtctcaaaaaccccaaaacaaaacatcttaccagaaaagataaaagaaacagcaaagtaaaaagcagcacttggtgtcttcttcaaactcagaatctcaaaggcaagaaaaaccatgctctcttaaagacatttctaagcctggggctacaaatgttcaggtttctgagctctctgtaggcgtcagcatttacctcctttttcaagggttctgctttggtcttttcctttgatccagacgttggcatttcctttgtgtgcccatcaggtatatagatcaagatacacggggcttctttgcaactatatgggctaaaaagaaaacagtcaaaagcttattcaaacaaaattatctaacttcaattaatactgaattaatagataaatttaatgatatacacagttaatgcttttcaaactacagtgcattcttgaggcaatgccacttatctaagagtgggcctgattgtttttgggtctctcctgcactaatataagaggtctagtctgatctgagaatataacctaagtcgttctgaacaaactcctcctctatagtgaagggagttttcctggccctatggactcagaacagcacaaagacacatcaggtatcatcaatctatacgaacaccgctgccaatgttgggggggggggcattgttcccaacatctcaccgcttctagcacacaatcttagacatggtcacatctcatgggggtgtttcactttagaaatgaatagcttattaatgtccagtatgcttacttactaattaattcaaatctaaaacattaagcataggtcaaatttaagctgagcagaaatttaccacagtgttttagtcgagctcaacttttaaattattcactgtgagtgaacttcaaagattttttttagatgttacatttatttacctaaaagacagctggtgtagagtgcctgctcgtgaaacagtgggctcaatcctcaacaccaccagaacaacacaaaaaaggacacaatatttacctaactggttcatatggttggtcgcatatgaagaaccctcttctctgcagttgtatgatgtcaccctttttcaaatccttaaggcagggatcccctagcattagttcttcatgctatgaagacatagaaccaaatgtaatttttctaagtagagcactaagataactggaaattacaagcaatattccaacagctagactatgctcacttaaaacaacaccggtacatttggtaaagcctttgctttgaaagcttgaggacctgagctggatccctgtaacacatataaaaatgctgatgtattttgattggctggtttttgttttgttttgtagcatctcaccatgaagccacatctaacctggagttagcaatcttcctgcctcggccctgggaaggctaggattacaggcaagcacattcatcccagtcctgtgaaaataagctcctcccataactatgaaatgcagctgaaggaacagtagcactcaaaggctctctgagcaggatgcacaggttttaattcacctctactctttaccaaatgtttaagcaagttacttaacttcactgtgaaagcatgtcatttaaaaatgggaacactcagccgggcattggtggcacaagcctttaatcccagcacttgggaggcacaggcaggcagatctctctgagttccaagataggctccaaagctacagagataccctgtctcgaaaaaacaaacaaacaaaaaagctaaaaatgggaacactcctctttacatctttattgtttacttgtttccattaattttgtttcagtgtggaagttgagcccagcgccttgtacatgctatgctaaagttctgccactgagctatatatctgagttttgagacaatatgacgatgtagcccaggctggccatgaactcatgaccttcctgcctcaaccccccaaaggtttggattgactggcgtgagctgccaggtccaggtacatctttatatttaaagaaaattctacaagcccttctatttaggctaagaaattaaaacatttaaaattagcttcccaaatgctagactttgtgtaagaaaggatgaggtctggtttcttcaggtaccttactgtccttgttgacgtactgcttaaagtcttcgtctttcccaagcactggctttgtaatcaagtgctcatatgtgacgcagattgctggaataggaagagcgtgtgtagtctcagcaagccaagtgatcttggttgttttcttgtagtctttgttttccaagttcaattttgcatccagagatgtaatttttccatctgcatttctagataaaagatcaaaaggcattcaaaagaatgaaaacaaactgctaaaaaagcattattctatagtaagtggaagaagaattctctttggaaaaattcaaaacaaccatcatcttaatttttgacatatgtctgacagacattagtcatatgaatgaaacaaactgctgtcagaatactactaattcactggagctcagatctgcacatgtatgttgaagaatacaaacacacataggaatttaaagtcacctggactactaaagcactataaacctgcaatgctaagttaacacttacaggcaagtatatgacaaagactacataactaagttagcaatcaggcaaggacatgacgatgaccacataattttcagaatttacacaaatcttaaacatagtacatctaaataatttgaaaacctgtagcacataatatttactagaaagtaatattcatcattaacactggccaatctactttaaatgtgtggctaaagataaaatatataaagattagatatataagtcctatccaaaggatccttcagcaattactgaatgagatgccatcaaaacgctctgaaacaaacaaaaaactatttttcatgtatttaaactggctcacagcacacacagcaactcagaaccagctccaactctagctatggatcatctggtgctctctcttgacctctgggggcacaaagaaccacacggtgcacatacattcatgcagacaaaatactcatacacaaaaaataaaaaacgcatagatataaaactaaactttcagtgtctctgtctgaacaaatttactagccagcagcatcagtgccaaggacaccaatcagagtctgaattagataatgtttaatacataaaaatgaaagatgttttttcccacagagttgaaaaacaaacaaaaactcttacttgtgtattttagtaatgttgatgttgccccagtttataaatgtgaccatctctccctctgagaaagtctctgcatcggctccttctatgaaaaccttgggactataccacacaggcttcaagccaacatcaggattctggatgatcaaaagaaaagcaggaaacatgttcagcaacaagctcctaaacccccagtgcagtacgaaaacccttcccttccccactgtgttcttaccaaacagagttcctcatgctacagtcagaagcctgctttgttaaagtaggagagcaagttttacccagttccttcccaagtctgttcttgaatttaaacagtgcactcattacacaggcacacacagtgccctcaaagcagaaaacccacacgcagaaggccatctctgacacaggaccagtcactatctcggagttacagcaggcagcctatcccaaatgcttctagtccagggtgaccaatgatttcagggctaaaagcatagtattcgtcccacaatcagaccgtgccttgtgatcctcagtctcactgcttttgtatcaaaggaaaaggcaatcactttctcagaacaccatcagacagcagatgccaacttggcaggaaagtgtacagctttcgtgttttagaagacacattttgagaaaataccatgtatgtgtaggcagacaaactgtcctgttttacattgtggatcagatgaagaaagagattaagaagaatacctagctcctagctccaaatcttcgacatgagtatacaacctggagtaaactgcagaaaccaggaaaagtaaaaagggccgtttcaggggtaagggaacaagagagggtaaaagcagggtaagttatctgaaaggggaaatgggaaaaaaaggggggaggggaggctctaactgggagatcaatacaggaagagggagtaaggattctgaaagggtcctaaggaatcagactatgtaactatctacctaacaaaaaagctaacagcaggcactagaaaccctccttttgttggtcagagttgtccaagagactcccagcattataggctattgactatagcccttgactgcctagcccccagaggtaaattcctattgctatagacactatacactttagacatagggcccagttggaactgacctgaaaggccccttcctgaagacaagctttcaattcaccagaaggcaccatgtaagcttccaaagcaaagaagcaaccaacaggcctacgaagctatgacgcctatgacccacaaagcaaccactatggcaccataaccctgagggtgaattagtggcacacattcttggcaaaccagcagctctctaacttacggtccacccaacaagagggaaaccattctggtactagaaacctagccaactacctggagatactgaagtcatggatcttggaggggaacctacaactgatacttcactaacccataatccctaagtacattctaaatgttcaccctgtatccacagagagattagttctcactacccattcaaggaaacttccctctgcaacagacagagaccactccagaaaaccacaggaaagagcgcgcgcatgcacacacagacagacagacagacagacacacacacacacacacacacacagagagagagagagagagagagagagacagagagacagagacagagaaagagaaaatacaacaattaatgaaaaaaagaggccatggatttgaaagagcagcggggtgttatgtgaaggtttggagagaggaacatgaaggaggaaattatgtaatctcaaaaataaaataataacaaactgcaaacattaagtagtccctaatccctttttgagagagagagaaaaaaaaaggaacatgatgcatgtttgttgagattcagtcttgtcctaatctcatttttcagccagagtttgaaaagtaacgatttataataagtttattttagttcatgatgatgaagaaaaaaatgcctttttcattaagtttcaggactttaaaaaacagtatgcatttacttcattattacatctacttactgatacaaccatgcatgtgtgtgcgtgttagtgggtctaatgattgaaagacaaagtgtaaagttgaaagaggacgtaccacagcttccacacaccggtaagaatgtgagttctgacaccccaccttcagaacgactctaagaaggaagaggaaagacctcctcacacattaaaaagctgtctctacataacagaaagtaagtgctgacagaatataacagttctgtcatgtgctgggcatcattagtaacataaattacttcagcaagaaatccacacaaagatcttttccaattggtatgaaatcttgacaaatactatgaaactgaaaatatcacaaaaccagaagaaaacacagtagccacaatgcagggctaccttgggatgtctggctacttccttcatctcctcctgtgcctctgggacattcacggggaccacttccttcttgagcaatgcgacataccgtggagccaccgggtcaataacctgcaacaaacattctcgtgtacatattgaaatacatagtaacacatcgtaaataaaaagagtaacagcacaggaatactaactggttttatttgttactgcatttactaatttttatgttaattctttcatatttagtttagtttatctgtgacttctttactgtcactcaagtaaagcttaaaaaagaaaaatgaaaaactagttacaaaccaacagacacaagatttaagattttcttccccaaaataactactggcaggtaaaaagaaactgaagagaacaagtccaaaatattttgaaaataatctttaaatctagcagtattagaaatgagaatcctgtgagagtttataaattaaggtaatttgatattcagtcttgcactgctggagagacattcatttgaagtatcatttctataatgagttaagcaccatagcaccatctaaagcagaacagcattaggtcactataataaggcagccctgcagtttacaagaacaaacaaggtgatcctgttgagctacatgccacacacacggtgggtctctatgatggaaagtaaaaaatctgaaacacatctggtctcaagtgttttggaaaagtatacacacagagaaaccattacattcccaaatttaacacacacttggcacagacaggcacacaataagtatctgcagattaactgaatgaataatcttttaactatgctacaacccattctagctccaaaataggagcagcctcttcatctggaagcagtgaagagtatacattaatcaagcaaaatagaagcacttaaatactaaatacccgggagaaaaataagcacaaaggcaaatttggaactgggctttgtttctcatactgctggtccttgttctaggaggcaggctgagtcaaggggaagaccctccctctaataaatgcatggatggacagatggacggatggatggatgacaaatgcagtcagataatatttaagcctccaaaatagctttaaacaagcaacacaacgctgagaaacttaattctattctctgcagctaacttcctcacctgcaaaactgtcaaaaaatgtgcacacacctaatgccagcattcaggaggcagaggcaggaggatctctatgagttcaaggccagcctggtcaacacagtgagttccaagacagacagggctatgtactatgtagactgactcaaaaaaaaaaagggggggggcaggatccacagctggctactacctagggagctgtctacacactcttgggctgtgatagagaagttaagtttcaaatggtctaggaaaagtctcgaaatttgtttttaaaaaatcattctataaaatttagcaaacaactgtggagaaccatgaattatttaaagaactggagttcatagccagaaatggtagaacacaactgttaattttaactactttatactttagaagctgaggcaggagtattgcttcaacccatgacaagtctgggcaacctagacaggcttctcctaaaaaaaagaaaaagaaaagaaagaagaaatgatatttaagtcccctttggctctaaaattatataattcttaagactctgaaccagtggttttcaaatgactccaaagaatctaaagtattcgaaaagaggcctgaaagaaccccaaaagggtattacagggtgaatctgaaatgtccccaggtttacaattaagcactttctcagtggcactgttatgatggccgcagaacacttaagcaaggggcctggatgtaccacacaggccatcagagaaagtagagccacaacctcccaaaagagtaccaccatctaggaactaggtgtccaaacacctagtgagcctgtggaggatatcacacaaacaaaacacaacaagaacagagaaaggaaaggagtgacaatgacagagtaaagcccttcccagacttcccatgttagctccagagctctgacagccaggaacttcacattcaagaggtaacaaaaagcaactcctctgggaaaactgccggctaaaagagaagtttgaagttactacatgggggatagatggcttcagacttaagagcactagctactcttcagaagatgtaggttctatctccagcacctcagagcagctcacaactggctgtaaattcaatctcaaagatctagtgcctgtgtgggcactaggcacacatgtaatgcacagatacataatatgtggaccaaatatctgtaccccataaaataaagtaaaaatttaaaaatgaaaatctttcaataattttttgttaagttactacatagagttctcactggcacagacagctcatcatagaggaatgtgaagttcctgctcttagcactcctgtgtactcctatattaaacatgagtagataacctagagacatgacactactactaatgctaaaaccatgaaacatgcatacaaggttattttgaaggtctttgaaatatgacaggaaaaatgagaatttcatcaggaggagccataaatcaagagagagaaaactagaggccccatgatcgcacatatccagagagaagacaggctaggttgaagctcagtgttgaacatgtgcactgcacacagacatgggagaggggggagtgagggcaggagagagggggggacaaaaactgaaacagaatttgcacgtgcctgcaattgcaacacctgagaggcagagacagaggcaggagactcacattaggactgtctcaaaaatcaaaggggagtgtatgttaagaaactccagaactgaaggaatgagttaaataacccatgtgttatttcaatggatatgatgaaaacagacccacacattaatgtaaaagaacaggtcatagccagacaaggtagcccacagaataaggcaggaagatcctgagttacagactaagtaagaccctgtttcataaacaaagccatcacacacagcaagtcataagcctggcagaggttagcacccatagacccagcttgttactcagctttgcatctgcaagttcaagattatttcaggcagcacagtgagccttgctctcaaaaacataacttttaaaatgtcatacaagaggtctcattatcccatacagagtgcagaacaaaagaaaggacagttagaaggaaggacgctagcatggcggtgcatgcatgactatagtcccagccccagggagactgaggtaggaagaccacttaagtgcaagcacttgagaccaggggatcccacagagacccagcacaaacaaaacaaaaccgtgcaggaataggtaatccatcagagagaggaagagaagggagccccagagagatgtaaagagatctgggttacagctctgccccaaagcacaagagcaccaatgcataccaccagagcagcaggtcctggcagagatgctaccatgagtaagttagagaacatatgaagtacctgacacctgaaaggaacttggtgagctcccagacttcaagaaccaggagtcagtcagtatgggaggaggagaaggtaaaataaaacaagtgacagaaggaaaccaaattgctatgagcaaaagacccaaaaagaaaaccccaagtagcatcccacactcctagaatatggacaacaaacaccacaagagtcatctgaaaactcagcagctttctctatggggaggaaagtggaagggaaaagcccacggaatcctgtgacccagagaaatacatttcatatatctgaaataaatacatacatgtagcttgattaaaactcaggcctacaaagcctgagtttaaaaaggtatacaaattaacttgcttgtaaattctacctgtgtttgttattagtaactgcagcaacagaaagaaccaattaatgattccttaatacatattaaaaaaaaaaaacttactaaaagtgaaaaactaaataaattcaagacacatgcaagacaagcaactacttgaggcaagacatcagcacaaccgagcagcaacatcaaggaagaatttacagatcacaatcacagaaaccgcagtgcagaacgtgcattctaatgattcgccttattatagtgtccaagcatccgcttccaattagggattatcaatgtcaatatgcatgattcctggtttgatttcccaattaagaaagctttgttttttttgttttttgtttttttttttttcaagctgaaagcacagcaactgtagttatcgaaccttcaatacaactcaatatgtaatttttaaactctacatcctctcagtacacagggaatagcaaaacggagttagcgacgtctccctttgccacaaagaacataggacacatttggcaaactagggatgatgcactgtcaccaggtttgttgagcaagtcgttagagacatgtgattgtgcttcagagctgtagaactcccctggttgtaacatgtactatgctagaagctatgtttacagcaatacaagtatgaagtgataccttcttacagagagctcgcagcttgaaagcagaaaaatgaaatgcagagtgttcgtaaaagatttaaggaaaaactgttaccatttcccataaatccgagtgcattgcttcaataattgttccttgctggggttgttaatggcttagtgcccttatccatttaaagaaggaaaacattccatttccctgaaagactgcacagtgagaacattgttgagagggcctgatctctgtgatgagcactccagtgagtcagttctgaagtctatcacccaggagggaggcagcagcggcagagaactgtggggcctgatctgtcagttctgaggtctattacccaggagggaggcggcagcggaagagaactgtgtacctttttgttaaatgcccagattttgtcccattccatgttcacaacagaccttgaggagccctagaaaagcaataagaatagtttaaggatgagaaataccaagcagggggctggcaagatggctcagagggctcccatgcctaatgacctaagtttagtccctgggacaacatgatggaaggagagaacaatgtcttaaacatgtcctctgatgtccatgttatacacacgtgtacatgctcatatataaactaaaaataaaaacaaatactcggaagattgtgcttcaagtcaagcatgcttagaacaacaacaaacaaacaaaaataaacaataaatgcttgcaaatttacttccactgaaatttagaccttggtgtgtagccttacacgaagtttcctgttggaagccattgtgtagactggccagagttgacacctgacctcccactgcatggaaatactttcgttccaatctttttattattacaaaacgttaacttactcccttcagaaaagtcttctcttaggtaggcacagtggcctgtgcctgtaagcctagtacttgggagacacaggcaaaaagacctctacataattaaggccagcctggtcaacagagcaattcctaagccaccagggatacacactggcttggggggtgggggtggggaccatccttgatggcatgggattacacatctgctgtcccaacactcaggaaactgaggcaggaaggtcaccaggagttacaaagtgaaatcttatctcaaaaagaacaaatttcacagtgaaccttaacaggtcacccacaaacatggagtaggaacaacagaggtgacaacaaaagcagtgcttgggaatgcaggggagctggaaaagagacaggagcttacctgagcagcgatgaactgcttcagtccctcaactgtcattcctcttctcagaactcctcgcactgtaggaaaccgagggtcatccctgggaaatgtgcacattgctaagtgaatttttatatcacttgactacagagagaagattcctaatgaataatgaagtgtattcagaacaaagtgtggtggcacaggcctgcaataccagcaatacctgcaaggctgaggcaggaggagtaatcacaagttgaaggtgagttcagaggcagctttagctagagaaacccgatttcaaaccacacaaccgatagtcccttgttaatgcttgacaggctgtgagggtacacacctttaactgcagcattgggaagtgggggcaggcaatctctgtgagttcacacctagcctggtctacacagcaggacctaggacagctaatgctatatagtgagacgcttcacaaataaaaccaggcaagacagagaatcatgtcaactgtttacaacgtatacaacgtatatatatatcccatatatatatatggaagttcctgacattcagcagggatttgacaatttcagtacagctgcaattatacactttatacaaagatagtggccaagataaacctgccttttatcaaattcagctctataatcaaactgaaaatttctagcatatacctaattcataatatattcttatcttggtcattatttgtgtctttttctttttacggagactagccttgactgaactcagcctcttcctgcctcgacttcttgagtgacagaattagagatgtttgtcccacccctcctgtcccctgaggccagtttctcctctctcctactcccctttcccattcctgttcccccaataaaaaaaccctctactcaagctctgtacatggcgtcttgctctaacacactgctttttaaaattacaacagtgctgatagtatgaaccaacacacaaagtcttaattcaggaaaaataatgtttttagatttataaccatgaaaatccagatatatgggcaccattaatgtaagtacatgactacaaggtgatctccagttgtacacaaacctttcttacaaaacttccatgaagttactcctatctacagaaactttctgattctttccggaacatgttcaacaaacaaggtgggtcgtgaagcctgaggctgagaccacttcaccttagcctcacgtcagggccacaggggcctagaaagcacccagctgagagaaaatcccatagtacacttctgtgtagaggatacaaaagaccagagttataaccactctctattaatgctaagatccacaccgaggatgtggtccagtgcacttctcattttcctatgccatggtcagctacagacaacacgtttacagcatctaaattaagggagagaatgaccccaaggcactggctgaaacagatgaattaggaagtttacaggcgtataggcctatccactgaaccacttcctagtcaaacctggcacccacaagtagttagaaaaaaaaatctgctacagcaaagccttcctgctgtcatctttagacataccatccatccaccagtccttcattgacaaaccacgtaagttttcttttggacagcactgtgttgttgaggttcaagcgactgtattcccagatgtatggcttccttatgcctaaagcttcaataatccaataaaattgctcatctctatcgtggtattctgttgtcctcaaggcatgagtaacaccttcaatgctgtccactatagggcacgcaaagtcatatgttggataaacactaggggaaaaaaaaaaagaattttatcttccccaccttaaacattagtagccacactcatttaaaatataaatccttacatattaagactgttgtttttgctggacatgatgatttacacttgtaatatcaacatttggaaggatggaagcagaaagatcattacagactctaggccaacctgggctgcatcaaatgcactatttaaacatagcctctctctctctctctctctctctctctctctctctctcccctccctccctccctccctcctcctctctctctcccccctccccctccctccctccctccctctctctctctctctctctctcacacacacacacaccaataaaaaaaaagctgccattgttatgatatactttgagtattacaatgtagaaaacaaacattttttaactattatttttattttatgtgttttcaggattttgcctacactttgtatgtacaatgcctgctaaggccagaaaggagtgatggatcccctggaactggagtgagctgccatggtctgctgaagaacattcactgctttcaacccctgagccatctctccagcccactggtttcatgttgtgagacgaagtcacactatattcccatggctggcctagtgctcactctaggtatagtccaagctagccttgagctaatggcaatcctctacctcccaagcactggaataagtcagcaagttttgcaattaaatacataattcagtattagtttggcaaattctatagcatttctgtaatagcaaatatatattgttcagggccaatctggactataaaatgtgacagatactgcttcaaaagaaggaagaaaggaaagaatgagggcaagcaggcaggcaacaaaaattctcatttaaaatggaacttattctttacagtgctggggactggacccaggatcttctgaatgtgaggtaagcaatgtaccactgagtttctgcctagctatattccagcaggacagcattctctacatcagctggtagagcacatgcctagcctatgtaaggtcataggtttatagcagcactatcaaaaaaaaaaagggggggggagcacttttaaaaggtgatttctgcttaaaatgaagtagacaatcattttatacttctcacacacagcatcaacttacactattaaaatatattattacattatgcctcctaatttttaagcttcaactcaagatgtaattataccaggcagggtaatgaaaatctgtaattccagtacccgagaagacgaggcaggaagatcatgaatgaaaggccaggctgggcttatgatgagtccttgtctcaaagccacccctactcccccaaaaaacaacaacccaaaccaaaaactaaccagctgtcagtcacttctgctactctgcagaaggtacagtgatttcacatgcagtggctttcttcagagcataaaaaaacaaaagcaagatggctcatgattataatcccaacactcagggctgaggcaggaggatcactgtgagttcaaggccagcttatgttataaaaataagacactttctcaaaataaaaaccaaaaaaaaaaaaaaaaaaaaacccacaaaaaaactaacaaagagaaaatcttggctggctacatttcagacaagctaacatccagagtttacaaagaattgcagatattaaataccaaggaaatgccaggcagtggtggcacactcctttaatcccagaactctggaggcagaggcaggtggatctctgagttcgagaccagcctggtctacaagagctagttccaggacagcctccaaagccacagggaaaccctgtcttggaaacaaacaaacaaaaaaaaaaaaaaaccaaggaaataaacccaccaatcaagaaataagcaaatgaactcagcggttttataaaacaagctaaaaactattcttgaaagtgttcaatatccctaccatagaggaaatagaattaagactactttgggataccatgttaccccagtcagaatggctaccatcatgaaatcttacaaggaatgttggaaagggaggacatgcagagaaaggaacctttccccactcctggtgggagtgcaagtttatacagccactgtggaaatcagtttgtatattttcaaaatattaaaaagagaactaccatatgacacagctatttcattcctgagcatacacttacacacacacacacacacacacacacacacacacacacacacactattgctaatttactcactataccaaataactggaattaacctaattgtatatcagctccattaacagatgaatggataatacaaatttagtgtatacctaaaaattaaaataccattcagctctaaagaaaaaatataataaaaatgcaggaaattagattgacttagaatgtacaatgttaaaggggggggggtcacacaatatcagaaaaaacctacataccctcccacatctgaagaacctaactgacaatacagatgtaaacaaacgcacacatggacgcatatggaaaaagaatgagtgtctagtggggggtgagggaggactgaatgcattcaaaggacacaagttattcaaaaggatacaaaactaattctttcctagctctatcctagaccctatcctgcctggatctttcagttatttatttatttatttatttatttatttatttatttatttatttatggcggtgaatagatagggccatgaaaatatattcagtagtgaaagtgtaaaattcagtgtgaagcttcacaactccagaatggctaaccatagaggtgcataacttgtaaagaattcaggtctggtgcaagttcttcataacaaagtttattaaaaagaaaagaaagagaacatagtctacagataattttacagaacaaggacagacttttaaagggtatcctatttaaagaaaaagacctaaacttagggatgttagttagtggcaggacctttgcctggtgagcatgaggccctgagcgcaagccttagaaacaggaacttcaaaacaaaatatgataatctgttaagagcaccaggaaaaaataatcaaaactttaaaacacacttgttcttttcttggtttgttcatgttttggtaaatttttgtaccatcattgttgtgtcaatttatgctcagaaaaagaattacagacgaggaacatcattacctaaagatatacttacacacttagtcaagacagacgggaaaactacaaagcgccaaggactcgtaagatagctgagtgagaaagcatccctgagaggctgccctacacacctccagaaaaggccactcagccaactcacctatgaagaacaaaggcgctggctccctgactgttctgcatcccctcccctcatgttcacacaaggcaaagcaaggtcacccgacttacttgtatttattcccagttctggggtggggctggattttgcatcggtaaagggttgggtccctcatacacccattgttactgctcatgtcaatttttgctcgtaggcaacaggactgaccaaacgggcttccttttttcatttcttcccacatttgcagattcttctcaacagctgtaaataacgtgtatattcttatctatttgactgatgtgagttttctttttgtattgcagacatattccattagtttagaaacactgtaacattaatgctgggtgaggtaggacaggtggtggcagtccccagctctcaggaggctggggtgggaggaaggaacatgaaggccaggaaaagctactcagtgaaaccctatctcagaaacagacaacatacctcaatatcattagggaatatactctatgaatgtgcaaaaaagtaagtcaatacatttcactaatacagcagaagaggaagccttccttctcagctgctacgccccatttcccatcaaggcacagctaactggtcagctcttcccccacctccaagtttgacactatgcctttaaagtagaattattcttttcttttgctgaattatagccggggacagagcagtttggcctgacctttgggctccttcaaagtcccttaggcacccctgtgtggcacagaaaatgctcggctccaagaaaatgaaagatcacagaaaatagatagtggtatacgacataagggatttagctgcaaagagactctatacactatgtggctccagctctacctgcctcagaatatcaaaagcaagcttgctccactaagatgagaaagaaatgctaaccagtgcctttctgtgggaacttctgaagctacactcaaaataaatacatataattatcaaaatctagtgaactccctttgaaactgcaattaaaaaaaatttactgtaacaatttaaatttagtatgcttcccaaatgagatgctttagatttaaatatagcgtgggagctctagcaacatattgcactgaataaaattatcttgatttatgtcaggtggtggtggtgcaccttactttaatcccaccactcaggaggcagaggcaggtggacctctgagtttgaggccagcctggactatatagtgagttctaggacagcaagggctatacagagaaaccatgtctttaaaaaaaacaaacaaaacaaaagtctgatttgtaagctcaggaacaagtcacaaataagaaaggaaaggtagtctctgaagactggatatagcgatcatattccatgtaacctgtcatcccagcacagggaagccaaggcaggacagcaagttcaacatcacagtgggctaaatggtagcctttgtatttggttgtgactgttggaatgtgacatgtctcccatgggctctctgtgtaaacacctgatctctagctgatggcacagttttggaaggttatggaaagtttggaaggttaggattatgccttgagtgtaatagttcagcatcaatatgatcccagcacataaacaagccatactgtaagctcccagcaacaatgacagagcgctgctccctccagcagctgactgtaccctcttaagcttcttgccacccagcctcatggccccaagctgctgtcagatgggatcacagcagtgtaaaggtaactaaaagaagcatggacttcagccaggtgattctgcaccaacagagggatgatggactttgttacagtaacccccacacacacccacatgctgtggtgttctcggcattaccaaacattttagcactgttagccatttaaataagtaactataaatgttacagaaaaaaatcctccaaatgaaataaaggccaaagactgcatacggaagtgaggtgtcagagtgaggagaccgcatacagttctcccgcaaataaggtcctaaggagccaggccagactggagtaagctcagtggcctagcatgtgcaggcctaggttagaccccccaaggcggacacacacacacacacacacacacacacacacacacacacacacacacacacacacacacacggggacggggactacaacgaccacgacactaatgcaagcagggcacaatgacacatcctataatcccaacacttaggagaccatggcacgagaatctcaagtttgaacccaacctaggccacatgtggcaagactgcctcagacaaacacagaattagagaaagaaatagccttaaatgtgtcttaaggaacatctttctttaaaaaaaaaaaaaaaaaagaaagaaaccttatcaattaaaatctgacacaaactgtgccttacagttttgcctgtgcttggactccgccctctgctcacgctctgctttcatctgttctgcaggggtgtcgtccacgtaagccttcccttcttgaattaacttctctgcatatttcattatagtttcaaaatgatctgaagtataagtaaactgatcgggtttaatatgcagcatcgcaacatcttccaagataacctgcagagggaaatcaaataaccatcagtgttatctgtcattttcttacacacttttaacccacgacatttattttgggcaaatgtaataaaacaccatcagtcttaaacagcctgaagatgattgtggatgatgcatgatgttaggtcaaaaaaaaaaaaaaaaaaaaaaaaaactattcagtgcattggcttccagatttccagctgcaaaagccgatctcaaggtgagctctgtgtactgagagctgaactgctgtgacactgcccccatggcccctcagtgaatatattacgagcccttcagaataaagatgctagaaaaccacacctcacaattacctgtgcagttttaatttcattcataagcttaagattataactggaaacctgcttccagttaaattggtattcaaaggaaaatacattattcaagtaaactctacaataattggagaaaataaaattaacttatgttttttggtatgggagctcagttcttttttggcaggtctcaggcataaactatatacatgatgagggaaaaggcagctatgaaatcaagtttcttcgaataccatgaaggtatcagatcacactaattttaatcagcttttctgagaaaaaggccatcactacacttttcattaccttctcaaagtcttccttttccttttcagggtttgtgtcatcaaatctcatgatcagtttccctttaaagttaacctggtagtgctggttcagaagagcagcttttgcatgcccaatgtgtaagtaactacaacaaaaacatttcacagagaaactcattaacatgcttcaactactttcttacccttagcctctttgaggggtaagaactaaacaaaacgtccaacactcccccgtcattactttccaccaacaggcgctgtaacagaagatgtgactgacaagagacagcagactagaacatggacagtgtaatcgtaaggaacaactccttacataaactctcagagggcaaggtatgcaaccctaagaacaatcttttctttcttccaagaggaatggtcatttacaggaaaagttctgaaaccataattgatacagcccagtagttcacctctcaaatttgctgttgctggggacaaaccccaggacagttgcagtcactgtgatggctaagtcagagaacatgaaaattactgtgacagagaaaaagctataagttttgactactttccttggtttcagtttcttcagataccaacgataatattttaactaaatgatctcgaaggttcaatctagcaccaaattctacaaaccaaaatctaggaaagaaaaactgtttccatgataataaatgaaaacaaacaaacaaacaaacaaacaaaaaaaaaaaaaaaccaaaacattgctgacagtacctcacagccatgacctccttatcaacacagtggtgaggcactcggcaggcaaagacaggaggattacatgttccagggcagcctgggctacataaccctgacctaagatcacacatctgagatcttcctgctaaagatattaagcatttacaaagcaagtttaaatagctctgacagatgtttactagtttctgtggtagctacagtgactgtttttatgatagtcactttgtctgaaaggacatctttgatctcaactaatataccaatatgggaagagaaaatgcaaaccctcatttatgacactgcaccaatttttaagctgaaaacaaacaaaacctttctgtggtgctggggattgaacgcagtgctttgcccactgcagccccacaaaacccttgacttagacattcactcctgcagcactccagataggtgattcaactttccatataaatcaaagaattgcttgggtgtcttgagtgttatcacagaaaataaaaatttacatttcagcaaagggaacccaccaatgcataattaagaacaactgaatgcaacatatatatatatatatatatatatatatatatatactttctgtcctaattttgcaactttctataaatctaaaactaccattaaaataaatgtttaaaataaaagcccatttttgtccagactagagatgcctcagtaggagcacttggacccaggtttgttcccagcacccacagtcttcaaactgcctgtaactccagttccagagaatctgacactttcttctagcatccacagataccagggaactacatgtggtgcacagatatacatgcaagcaaagcacccatacacataaaataaaaattaatctaaaagataaaataagacaggcacagtggcacacccctttaatcccagcactcaggaaggaggtgaggcaggtgaatctctgtaagtttgaggccagcctggtctataaatggagttgcaggacagccagggctacacagagaaatcctgtttggaattaacaaattaactaactaactaactaaagggctgtgagttcccagaaaggaactgagacactgtgagatgtcgtgagtgtggtgcattcagtaatactgctataaccattgtccagaagagatacagccggagaaatagctcagtgggtaaaggcccctgctaccaagcctcacaaccacagttcaattcctaggcctccaatgataggagaaagtcaactcctaagcaatccactgacctccacatgtgacatgtgtgcctacatatacatacacacatgacaaataatcaagtgaacgtaatgcctttgtttttagccactagtcactgattacctagtattagctactgtgctcagcttcattctcaccactaagggtagatcttctgcatattgggtggacaggaaaaactctgatgccttaaagacatgtttgcccctgacaccgtgcatgcagtactaagaggacaaatgcaggaaaaccaccaggactcttaaaaccgtcctgagataaccagctcatgagaaaactgacatcaaatcagctctaaaaatagagttacagggctcccaggattggcacccacctttaatcccaacactaggaaggcagaaggcagaactctatgagttccaggccagcctggtcttcagagcaagttctaggacagccaaggctgttacatggagaaaccctgcctagaacacacacacacacacacacacacacacacacacacacacacacacacacacggagagaaacacacacacacacacacacacagacacacagacacacagacacacagacacacacacacacacacacacacacacacacacacacacacacagacacacacacaacacacacacacacacacacacacacacacacacacacacacacacacacacacacacacacacacgcacacacacagagatttatgatacatacttggcagtgatctacattacattgtgccatatcacacagtgggggggtaaattttagttactagggctctagaaacagatggcagagatttaagtttggcacacatgattaacacatggtgtgagtcaagtttctggaaccatgcgtgaaacagatagtaacagtgcctttgctcagagttttggatttataggttactgtatgtgaaacatgtgatagtgtctgtacataagaggtatcacacaaatgtgatgacacacacctgcaatgccaacacttaggagactgaagcaggaggaatgttacgagttcaagactagccttgtctacatggtgagtaccaacttagccagggcacatacagtaaaaccctctctcaaaacaccagaaaagcgccaggagtgtagctcagtcagtagagtgtttgtctagcacgcatgaagccctaggcttcgttctagcacggctcaaaagagtggcacatgagcataaacacaccactctagaagtgaggcaggagaaccaggaatctgaggtcaccctcagcaacaccgttaagttcaaaagcagtctgagggtggcctgtcattcatgagggtttgtctcaaaaataaaacatcagacaaacaaacaagaggcaaagaggtaagtcaagccttccattttcatgcatacagaaaagaattcaaagttttttaacagcaaatgtgctcaaaagcaaaaacgttaaaagactggatgctgggttgcactccagttcctctactgtattagagcatggcctctgaaattataaacactcaaatatgagaaacttactttttaataaatgacagtggtggaaaaaaaaggataaatggcaagtcattaacaccagtattcaaaaggacaactgtgacctctcacagtgcacagtaacaaaatgccagggatctaaaatgtatgcggaaactgaacctttgtcaattatcaatccctcattgatcaagtctgtagattcttttagttactatttctttcattttttttttcttttaaaaacttatttttaagagctagagatggctcattggttaacacttgctgttcttgcagaggaaccaagttcaattttcagcacccacaatgccttgggcacctgcaggcccaggtgaacacaaacagacaagcacatccttacacacacatataataaataaaaaattttaaatatgaaataaaatttatgtttgcgtatgtgggtgttttgccagcaagtatgtctatgtctaagtgcctagagcctgcagagccagaagaggacattagctctcctggaactggagttccagttagttgtgagctgccacacaggtgctgggaagtgaacctgggtcctctggcacagcagcactgttacccacggagccatctctgtaggcgctttcatttccttctacctgttcaccatctgagttgaaatgtggacttgtggctgcggtagaggactatgcctgtaatcccagcactcagaagcaaaaccaggagttcaaagccaggtttgctgcagggactttagctacaccagacgtggtctcactgtcacctcaccatcccaagatgtagaattgcaaactgctattagtgacaagactgtgattaaataactattacacagaaagtgaaaggagagttgtgatatgccagtagggaaagatttgattacaaactgcaaggtctgaaattaaattcaggaatacaaacatctcacttacaacaaaatgctctcctaagactaaactcccggccgggtgttaatggcgcacgcctttaatcccagcactcgggaggcagaggcaggcggatctctgtgagtttgaggtcagcctggtcttcagagtgagttccaggacagcctccaaagctacacagagaaaccctgtctcgaaaaaaagagtaaactcccgagtgaggctgctatgggagatgcacttgtgtattagtacctctggaaggattctattacaagcctgtctagagaacagaatgactgacagacactgaaggcagaggaatctactcagcctgagggatgcagggcaggacctgtgggctcttaggagttagtcaagtacgattttctgtatgtgtcaagagttaataagtttaggaaacctgcaaatttatcaaagttagtaggttttccaaaattcccctacctttattttagaaaagtaaatgttactgtaacagctactaaaaatataaaggactgagtaagtataggtatgaatccttactgaaaaaaggctgtaaaaatctcaaaatacaagcaaaacctaagctttactacatatggacactttcttatttatatttaaagttttttatttatgggtattttcttgttttttaaattctaaaataaaatttagatattgtttctcctactgccttaaagaactaaaagtactacaaattaacaaagctgtaaataattaaaactacaaattaacaaggctgtaaataattgaactacaaattaacaaagctgtaaataattcagcccaggtttttaggtttactcccccttaacccatatcctctggatgaacacagcaattgaagtccttagggctgcagaacttctccactaagcgtttggctgcaagcaggtggcatttccttacccactggcctctggagggaatctgactgtcaccttccccatctctgcacctggaagctcaacgaatttgccaacatcctgttttttgtctggtacctaaaacacaaaaaatacacagcaaagttacatggctaaatgtttatgaatacattcatttacaaattctggtcataagcagaatgatgactagaacatctttacactgtatttacagaatcaaactctagtgaggaagctgaataaaagcaagcatcagctagtggagacattatatatatatataaggcagtgtatatacacacacacacacatatatatatatataaggcagtgtatatacacacacacacacacaatatatatatatatatatatatatatatatatatatatggcagtgtatatacacacacacacacacaatatatatatatatataaggcagtgtatatacacacacacacacacacacatataaagctttctatatgtatacaatcatacatatacatatatataattttatttcagcggagacatttaaaggtaggaaggtgacctctgctgctgtactggttgtggcatcctacagaattcacagagagactcttcaaaacctagactcaattcaatggctcaacatcagtgaagattcaagatgaaggagtaagtacaagttaaacacgtgaccagggacatcacttaatagcgggacaaatacccagcaccaaaaaccaatacataaaacgtgattttcattatacagaagagcatgcatcaccggggacatgatcttttttttttttttaagattttatttatttatttattttgtatacagtcttctgcctgcatgcaggcagacggcaccagatctcattcaaggcagttgtgagccaccatgtggttgctgggaattgaactcaggacctctggaagaacatcagtgctcttaaccgctgagccatctctccagcccagacatgatcttataaagttcagggttttatgtagttgagcaaataaaggtatacaaagacttaacaaaatatagagactcagttagactgaaacatcaggataaaaagaaaaaaattagagactgtgcaatggctcagccggtaaaagcacctgctaccagctcgaagatatgaggtgggtccctgggacccacaggtggagacctgacctccacgaatgccatagctcatatgcacctataaacacaaatacataaaatgaacacacacacacaaaaaaaaactgaacacttgcttaccactctagctttgttttctgaaacatcccatttggtaccgactgagcggaaggcctgctgggcttcaagaaagccaaaccagcgtttaacgtggaccagagttttgttctgctccagctgttcctgccatgcagcatttcctaatagtgaacataattttttaaatctttactaaattggcaaagtctaaagcagagttcccattgtagtttacttatgtgaatgagattagcttacagctgtgtgtccgcaatggaacccttagtttagtatattttgtagaaatcacaaaacaaatactttttaggtcaaggatatgtgtggtggtgcacgcctcccatcccagcactcaggagcctgagacagaagggtgggtcccagccaccggttgggctacctagttctacttagaaatggaacaaacacccaaaacacgttacaggggattaactcaagttctctaagactggatcctgtcctccttccatcacatcacaagccctgtgaagtccaatgtcaattcacagtacatcaactggtgagaacagtacaagcaaggtcaccaagagcagttaatttctgcatcagcatcagtgcagaaacaggggtcacctctccctcctttgaaaccctgttactgtacagagccactgttagccccatttcaactacacacaatgatgttcagagtttgccgtaaattcctaatcctgtcagccaattcatgcacctcaagcttttaataggtccaaagcttccacaaaacaggccatctacctccatcatcttgagtcatcttcagtgatccatgttttatcatatagtgtatacctgaaagaatacagctctctacacaaccaccatatcagatataagctacactgtagggagacatcatagccatgcatcatcctaaggcctggctacaggtgtgcctgaccatgcccatcagggtgtgctcaaggtgatgtcagggtgacatgggagaggtttaaagggacagataaggcacatggagctctctcgccttgctgctttggcacactctggcttgctgttggctggcatttatctattaaaagtgatcctaaccttacggatttcatataagttattcaccgttttactacacagtcaaaattgcttcttggggggaggggtgctcaagacagggtttctctgtgtagtcctggcgattctggaactcactacgtagactaggctggcaccaaacctgcttctgcctcctgagtgctgagattaaaggcgtgcaccaccactgcccaatcaagattacatttttaaaggctgactctcatttggcctcatgacttcagtgatctcaagtcatgagaacctaacagcttcgctgtgaaattactgctgtatttgcctccatgaaatctggagtgcatgactaggtgaagtttcaacctcttccagctgcctgagcatccttgttagactactgggttctgtagagttctcacgttttcagtgtgttgtatatatttaatcctgaccatggtaaaaatactacagctatgaattatgtcaaaacatttcaaactataatttttaagtacagatttcatatattatacctcatgaagtttttcttgttttgtttttcaagtcaactgtttcccaggttggttagaacatcatcacatctgttgcaaattgattatacaagaggaaaaaagggacccaccaaaagaataacactccaaatacctgactaatttgcccctcacattcctactgaacacaaagattttccaagctggaaacaagtactgggaatgagttagtcgctaaggttggagtactaagtaggatgagggtctctttagtaggaatgacaagagctccaaaggcaagagaagtcaagaaaagagatgcttccaggaccaacaaaggatactaaatttctgtgaccaggaccaagaaagccagattaactaccctcagtaaggaggccctcagttactacctacacacatatacatagaggcagaaatatgtttacttttagcctagcaaagaattaaatggccaacaacaacagaaacaatgttgcatccctgtagtcccagccatttggcagactaaggcaggaaggtcacttgagcccaagagtttgagactatctccatctcaaaagaaatcaacctccccaccatgatcaaaatcaacaacaccccacccacccaaaagccaggtgtggatgcacacttttaatcccagaacaagagaggaagaagcaggcagatctctaggtcaactgggtctacagagtaagttccaggaccacaagggttagacagtgaaaccctgacttgaaaaaaactaaacaaaacataacaaaatacaaaaaccccaagaccccagtattttaatagttattggtcataccttttagagtggcccaaacacataaatctgctaaggtcaaggagtttccaactaggtatgttctcaaagacaggcagtggttaagctcagtaagtgcagaagtcagcgcagcacacgatgacagctttgtagcactgaactccaaccagtgatcaatctgtgaacacagaagagaatgcagcccagagttcaggcttcaaaacaagatgagcacaaaagaatgctgggaaagggaggcgcacttttagcttcctcagctggaacaaaactttcctcacccgaaattgtacaatctatcattacacagttcaattctggttatctgggctctaacaccaccacttaggtaaatcccatctctgtggttattttcctatgatttctttttggttatctccctccccctctttttcaggtacatggagggtcacatcaggaaagaacaagaaaaatacttgataactgacagctgtgggggactaactaatctgaagctacctagacagacaaattaatgcagctggggagatttaaaagtcaatcattaaatccattttctgccaggcatgttggcacatgtctgtaacccagcagggcaagaggatcaagtctggacaccagcctggggtatacagtgagaccttagccaaaactcctaaaaaaaaaaaaaaaagactttatttttgaactgtgtgacattctcaaaatttagggtaggacatacacaagagaaaaaccgcatctacagaatggcactgaaagctgctctgttattgctgtaattaaccattaacttaagaaagaaatgggctcccaaatcgatgtgtgatcctgggtaatctcttaatttttctggcccgctgtcttatctgtaatatgaaaggtgaatggcatgagctaaacagtaaaatccagctatgaaatcctaggaaaccaggaaagtgaagatagtataaatgaccccaaagtataaatgaccccaaaatatacttagtgtggagggagacagtgaactttaagaggtgaagtttgttcctctgtggttctggggatcccccaaggccctgtgcatgccaacataagaagtctaacccaaaccacacttttagcttattgctctgaaaataaatatgcgatgacactaagtgtggtgggacatagctgtcatacactcaggagtctgagacaggagattcacagttctaggccagcacaggacatagcaagttgacaggctagcctggactacatagaaagactaggtttctgttttaaaaagcaaaccaaccggaaacattctttcccttggacctatggttaagtattgttcaaacccttgtaaggactgtcacttgtcaatgcatggtaggacaacactgttcccaaacatcagaaagcacaagacaaaacaagcacaagaaaataaacattccttgcttacctcagtgtgttccatcaagttagtaccgtacaacccagatgtagttgcaactctagccaagtagcgcagtattgaatttatgtcagtgaagaccacatccctagaatttaagcattaaataaacatcacagttgcttcagcaagttagtcacaaagaaatgtaaaaatggaaaccctaacatatttaccatattcttttttctactgtggtagttagaatgtaattggcccccataatctcatagaaagtggcactattaagagatgtggcttgttggaggaactgtgtcactgtgaggacaggctttaaggtctcttttgctcaagcttccctcactgtgacacggagcttacttcatgttgcttatgaaatgtaggaaatgtcttctctaataaataaaatatgaagtctttggataatctcatcaacccaaggaagaaagaactgtggattctgacatcacgttgaccaaatgaacagctgaagagcatcgctgatgcagctcattgacaggaccaactcagatctttagtctcctactcagaattgcaaggacttctgagggcctcagggtctaacctgatgttcattcatttgtttgtttcgtggtgctggggagggaactaagggcctcaagcaaaatatgaacatatttttaccacttagctgttcatttggtaaacaagatgtcagaatccacagttctttcttccttgggttgatgagattatccacagacttcatattttatttattagagaagacatttccatttatttgggaatggggtggagtgggcaggggtgagacaggatctccctcaataacacaagctgaccttgagctctcagtagttctgctaccacagcctgccaagagctgaggcggtgagcatgagcctcctatggtgttttactagaacagggcagtagcgatggcctaacaggaaaagctttgtgggtaaccctgttcctaaatgattcttaagacaactcttaagcttgatttcagccagtcctcctccagccaccaccacccagctataaagaattatttttgtcaaacagctatgatagggcacactcgcgtacatgtgcttgggggcgcgcacgcgcgcacacacacaggaaacatgtttctaggaacaatctacctaattagcaagtaaaataagcccagaaaattccgagctgcacatgtttaaatgtgttcagaactgaaaagacatgaataagcacttactccgaaacacgaagaagattctctttcccttcttccacagaaacgctgacatcacccttcacatgttccactgccagcagagcgtctaaaaatgacagcaccaaagatttatttcccttcaaaaacaaggtagtatttataacccgagtcacacacacagcaataaggatgaatcaacaatccaatattaagccccataaggtgtgataccccactcccacccctgcagtgaagctgaagcttgggtcttagaaaagtaacaaatggttcagctctcaaactctaaaacaccttgtaacactgtctttcagcacctcacacagtgcgtgaactcatcatcctgtcccctcatttaagatggagcgccagcacagatactcctttctatgtaaatactctgctccactgggagcagagtttaccaaagaaagatggttatcttgcaaggcttgttacatcagaaagcaagtgcgcttgtttgtctgtctcactctctagttatgttgactctggcttgcacgccagtgccctgttaaaacctatgttgaaatttagttgccctggtcacagcattaagagatgggtcttacagagtcaagcacgatgcctgtattcccagcacctggaggctgagggaggaacatctgttcaagacaagcctgggatggatatatagaagatcatctctgaaacctaaagaacaagactggagatacagctcagtagtacaaggcttgctgagcaggcttgaggccctgggttcagtaacctggaaagggttgggaggggagctgagccttctaggaaaggactaatactgtgagaggggggtgtgtgctacctccagcattctccctctttcctcaaggacctacagcagcaagaccaccactaaaactggtccattggttttggactttgcatcatccagagctgtgaccaagtaaatttctgcccattataaattaccctccctgtggtactgtcttacagttgcacaaagcagactaagacagcaagggatttctcaaaggtaacatacactttcagggtaatcctagtaaatgagatacatttagcatacgcataatggaatcctgtctcgcatataaaaagaatgaactactattacaggcaacactatgaaccacaaagccctgtcctatgtattaaaagataaagatacacacacacacacacacacacacacacacacacacacacacacacacggtatgagtcacgatatacaaaatcctaaaagcaaaaattaaaaaatcaggtcactggcactagatgccaggaagaatcttctgtaatgaaacatctggcattattgttagggaggtttatataccacatatgtctgtacatatatacaactgtatactaaaacatacaattaatattggttaacttagatatatgcaagttccaagtcaacgaatcttaaatagaaaattaaatatttcacatatactttgtcatgaatttaacatgaggaaaatgatgatacatataaaaggaaatgctgagttggaaggtcaccatttgaccttaatagccgagttcggaaggatgcatgaatggaagtatccacgaaaagagaaaggtttgcatggctccggctccgagttctctccattaaaatgcctttggttgaaaggaaagctctacatcggggaaaactggcaggctgcatcttaggtgatcaaattagaatgggaaaattaaactcacacaccaactgatgggctgcattgcagagcaatagttacaccacccctgtccaggatggacagcgtgaatccagccacaggaaacatctgacaacccaataagggaaacataagaggcctgtcatcttcagaagtcaaagctattaaaaccaagggaaggctagtaaatcattccacattgaaagaaaccggacaaacgggacattaagaggcaaacaaagcgtggtcattcccagttgtggggtcctactggaacaattagcttcaaacaataatgctgtgcactaagcagaagaactctatcaatgcgtggttgctgtatgtagttaggtagagagatgcagtgcttgtaggagatgcacacgaagcctcctgggtacagaagcatccgatgctgtatgctcttaggtaggatgggaaagttctgttctatgcgtgcatcttcaagtttgaaagtactttaacacacacaaaaccgacacagcaaggacataaaagcctcacaatttggggctggagaatgggtcagtggttaagagcactggctgctcttccagagcaggttcaactcccatcacccatatggcagctcacaactgtctgtaactccagttctagggactcactaccctcacacagacatacaggcaggcaaaacaccaatgcacataaacataaaagtaaataaacccttttaaaaaatccttacaatagaaatctggcttttcctaaatatttattctaattttattgtttaaagataagataatctgatttgaatgagttataaaaatttaaaataaacagaaaggtgtgagcaaaaaataatatatattctctaattggcctagagttcaaaatgaaaacaaaatttaagactctcttccagaacaccagcagaatgtggttcttcgttctagggacacaggcctagtggttctccacagtgattttcaaggaagtactagttcacaaaaacaaaacaaacagacaaacaacactatggcttagctatgtgctgaacacctaaaatgtgaaccaacgttcctgcagtctcacttagttctggcaaccaacactggataggtttcctccttccttacaggataaaacaaaacaaggaacctgtcaagtttcaccataaccaacagacaggtttgaactgaggattccaggattaatgatgaggccaacactgtctagtgacacaaaccaagaatcaaatctcaagactcaaatatactttcagagcttatggattattgctaggtcagtgtaaaggggctggaactaacatgctaaaatactatcattttaaaacatttcaagtggtttactacattctatttttaggactggggaatgtagctcagcggcagagcgcttgcttaaaatacgacgtgccctgagcaacaatcccaggagattaacacataaacaaatgtcttttcatttcaacaggctcagacctctgtcaaagctgagcaggtaagacatttatttcatcagcccccatatggcccaagtgtatttaaagggctgggcttcttaaagtacttccgagtctacaccacacacatcgtggttacatgatttcgtgcaatttcccaaagtaaggaaaaagcagactttctaaagtccagagcgatggcgctggccccttggaaggatcgattcggaattgatcgggcctccaccacgggcgcccgcggggtgaggagagagccccgggccagcatcagtgcgcagccttcccacggcttcccctaattactgcctgcagccagaagcgcacgctgccgcggttaaagctgcgagtgctgcggcagagtctgccctggccccgcgcctccgcagcggacggaagggggggcgagagaattcccatcttctctgaggggcggggaagggacagggcccagatgagaatcgggacgctgcgtgcaaaggtcgtgacaggcggcggggtgtttggttgcgcggggctcgctcgtcctgtgcctccctcagcggccgcccgggccccggcccgggccccgcacccgagggctgatgcaacccgcgcacggcggcggcggcggcggggacgcgacccttacccagcggagggtctccggcattcaccgtgaggcacagcgccgccatctcccaggggctgcgggtctaccgtcaggctgccttcccggcgcacggaacccggggctcctccggaagccaagagctgcaacgtgggcccgcgacccaagccaccgcagcctccgccccgcccccaaggcggtgaccgctggcgtcactgcgcgcgacgctgacgccacgagcacgcgtccgccggggccgctttcgctccgtcccactccgccgccacgacggcgggggtcgaggcacgccgctttgtgcgtcatcacagcgcgcccccgctccgctgaatccttccttccggctccccggcccgggagcgaaccccggcggcggcggtggcggtggcggtggcggcgagcgctaccgttcgtcatcacggtgcgcccgctccacctgcaaacgcaggctccatttgtcgcccttaggcagcgggtcggtcccacgtgcgctgccacgcggctcttgacacggaggcgggagggcgggccggctttccgacgctgcctcaagtgagaccagtttgtcctagggacggtgtcacatctgccaggctgctagtgacgactcttgtgtgcacacaaacagatgaaaagccctggaaaccacgcacggaatcgacgagctacactgagcataggggagcttcgtttcttcaggttttccccaaaagcaaatattgtttcacaatgatttgggggctggagaggtggctcagaggttaagagcaccggctgctcttccagaggacctgagttcaattcccagcacccacatggcggctcacacctgtctgtaactccagctccaagggaattgacatccatagcaagacaccaataaacataaagggtgtgggggctgagagacggctcagaggtgaaaccacaaggcggctcacgaccatctatagtgagatctgttgccatcttctggcctgcagggatacatgcagacataatttattatgtatatataataaataaaaattttaaaaaaagagaattatttggaagcagggcgtgtggtgcatgctaatcccagcacctaggaggcggaatagaaagaaaattatggggacaagaggaggaaaagaaggccctggcccctgagaatcatgagttccccagttaacatctgtagtgaaggctgacaacatcgacagcatttcaaatgagaatgttaaccattcaggctcgaggaccaagggcatatgagcttaagtattaagtcttcatccaatctcacagtactattaacttgtttttacagtgaaaacagaagcacaattcaggaacacctgtgaccaaattccttgctgttattgtaaagactatgaaatgtgactgctgtgtgcttcctctcttagagcagcacccctctcttaactcccatgcttaaatgtacattttttaaaaattgaataataaactccagctctgactcattggcttctccataaattttttttaggaggaagccaaggctccctctgtggaggtcttcagactgccaacagcagttacaggctatgtcacctgatgaagacatgatcaaggcaaggtccacttgtagcattcaaggccctatctcaaaggaaaaaaaaatcttttttttttttttttaaagatctttaaaaaatggtttgctgctaggaacgtattccaatggtagagcacttagcatacatgaaaacaagcaaacagacaaacaaacctgaaagagttttctataaaccagaagtagtaacctgtaatcctagcacttgggtgtctgaggcaagaggattgccaggagttcagttcaaggttacttgagctactaaataaacagtatctaaaaaaagaaacgttgtggtttgttttaagtaaagaagagttctttgcatatttgaaaaaaatggttaagccaaatgtgttgattaagacaggagccggcggatttcaagatagtctatcctataaagaacatttcaacccttagaataagataggtagatagataatagaaattctgcctcagaagaacaaaccaacaaaaataactacagtaatagttaaaagacttacaaaggagccaagtggttgtggctcgcaccttaactcccagcacttgggaggcagaggcaggtggatctatgtgaatttgaggccagcctggtctacagaatgagggccaggacaggctccaaagctacacaaagaaaccctgtctggaagaacaaatgaacaaacaaacaaaacaaaagacttacaaagggctccaagaaatacgtctgggctgagagttatgtctagtatttcaaggacagagtcctgactagattgctcaaatgtaaaaaccaaaacctcactgctgtcctaatttgttttgttttggagtataagcatctttcagagggttttctttttaatttattttttattttatgtgtattagtgttctgcctacatgtatgtctgtgtgagggtgccagatctcccggaactgtaattataggcagttgtgagctgccatgtaattgcaaggaacctaactaggatcctctggaagagtagccattgctcctaggctctgagccttctctctagcccctaaattctctgtgatgggtgtgtttgcgcagggtttttccaaaggttgaagttcaagttcaaggggcaggatgatttcagagaccagtacagatcttcccttactttccattaatctcagcaacatgtccacgtattcattagggagactcaatcttttcatgcagttttaggtttgctatttctttggttccttgcctcagaaccactaccaaagatggctacatttatacactgacattctgtggagtcgtcaaggtacctattactacaatgggatgaaaggtggcgtcagccagtgaacttaataccatttggttcccttccggcttcatttctacctctccttgcctcaccccaagtcatactcttctagcattaccttgaattcctgggatgataagttcaatctatgaacaactttatgccacaggaccaaaacactctcaaacacaaaggagcgtcagttcaccccacccattcttgatgacagtacagcctgaagcaaaagcaatcatttcataataacaagattgtgtcccgctaaggacagcaatgattttaggaattccttacagatccagacttgagattgcatcaacctgagcactggtttgactgctcattagctaggcacaccccatcccttcctttgcctgatctataaaacctcaaagttctttttagccccttaaaaacttgggaaaactggagacttggacttattaaataaaatgacaggattccattattttggactaagttccagcaccacatttggatagatctggttgaaacccaaaagggaggctggaagatgctagaaatattaagaggtggggcctaagtttccctgggctctggggtaagatagtaaagcaaagagtgagctctacttctctttttcactcccagctacaaggtgagaagttatttgcaccaccacaggttcccagcaggatgcactgtcctatctcccagctcccagacagcagggccaattgttcgtagactagaacctccagaactcggagcctgatgagacaccgtctctctgtaagttgactatctcaggtacctgtcacagtcatggaaaaccattagaagatgcctgtcgtgctgcagcggtagctgatggggagctggaatgtagagagaccagctaggtcccagtggtgagaaacagaccgagacactatttttaaaattatttatttatttatttataatgtatacagtgctctgcctacatgtaggcctgcaggtcagagagggcagagatctcattacagatgtttatgagccaccatgtggttgctgggaattgaactcaggtcctctgaagagcaagcaggcagtgctcttatcctctgagccatctttccagcccccagactgaggcattattaagtaaagaattagtcactgcaaaaaaacaaattagccaccacaaatgacaaagactccactaattcaggtgctttgacttgtctgtttaatttccacaaaaccatttcatttagagcaccactgaacatttttcaccggcaacaggtatgcatatgtacatcattgtgggggattcacatgcagttggcaaggagttattgaaactctgtaaagtttttaaacaatcctcccccttcagatgtgatgtaactaaagaccacactcagcttcattttatcatttttagaaccataaagaagtacttaggggctggagagatggctcagaggtttaagagctgctcttccggaggtcatgacttcaattcctagcaaccacaaggtggctcacaaccatctataatgagatctggtgccctcttctatcatataggcatacatgcaggcagaacactatatgcacaataaataaatcttttaaaaagaaaaagaagtactagttcaccccagccacataatcattttactatagccatagtgacttgctttctgttttctttctcttagaggtgtgcctgttattcgcacatgaaaccttagcttgtagcatgctgaattccttgtcttgctcttaacttcagatatcactcccctagaggagacatacttccttcatccagattctagaggagactccctgttagacttctcacctcacttgctttcaagtcaatttcttccacagaacttaacacaattatgaaataacttacaaaggaacagacttctggtcagtgccatggctactgctgaatggacaggacctgtttgaagtgattagcctacagtgaatgctgcattaatatttgagtacacatagtctcctggggcaacactgaatggttgagtaagatgtggtatataatcagagctcatgcttgacagggaagatgccaggacactaagagtttcacacaccattatgaggaacctcaagtttatcctgaaggcaaaggccaaaccaagcagactttgaatacgggagcttgactttttcaaatttacttttacatgtatgagtgttttttcctgcatgtatgtctgtgcaacacgtatgtgcctggtgcctgcagaggccagaggagggtgctggataccctgagacagacagttgtgttgggccaatctgggttaggcgaggccatgggactgcagaccctggaatgtcttttgcttctgctgtgccctcacatgtgtgtcgcagctctctctctctctggaatctagcttggtgtgagtggatgtggggagatctccactgcctgccatacagtgtgtttatctcttggaaacatccccttctacagggcattttcacttgtggattgtcaagaagatgacccctccctaactgctgtctcatttgataataataatgatagttcatacagagttttggtgaataaaaataaacacaaaggcatgtttcacagccagggtctatgagtttcacctaaggagctgcacggattgtagctcaagttaaggattaacaattgagtcccagtagctcagctggtgtaaagtcttttaaccttaatgtcgggagatgagttcacagaactcggagtgcatcatagctgaaacaaagctttgaaaacaacaaagactaacatgtttttgttaaataactttgcggtaaaaaaacaaaacaaaacaaaacaaaaaaacccaagaagacaatctaaagctttagaaaggcacatggttaaaaatgtggaactctttaaggtcagggaacaagaagaaagcagcccaattattcctggctgacgcactctccttgctaggtttggctgatgaccaaaggtgatgattaattccttatgttcatttcttctctcaatttcctgatataaaaaagactattaatgaatgaatgtgcaccctaaagatttaaagtagagctgactgattctttttcacaaataaaagctttggtttgtgattcctttaagattccttataaggttatctttcaagaaaagtaataaagtgattggccctttgtctgtaactacagaatgcagcctgccagtaaaagacctcacaagagcaccttgcttgcccacatggttaatctataacaggttgcttgggtatgaatatatgtgggttcttggaataatttgtttttcacctgtaatacataaaacgtttaatcatgtgagggagattttttttttttttttttttttttttttttttgcctataatcattcacttgagaaatggaacacaactgttttgactcttgtactgccaggaaggttctgttggggtataaaagctgtgacacaaacaagagaggacacacacagagagagaaagacagacagaataaagagacaagagaataaagaaggatattgaagagagagtttgtgagaaaaatttagtctgttcgacatcgtggatttctgtcaaaagccctgtgctgctggaggctggcccccagacaatgctagctgctcacactcacaactgttcttccagcttggttcattttttttctggaaagaaaccctgtttcctgatctgggcagggcttctcagtctagtcaaggtggcaatcaagctaatgcaagttacattctctcagtggaaggaataaaggccaattacccaactttacaattatgccttttaatgaaaacaagagaataaattaacccccatagtatttataagtttcaaatacttttgaaaggaaaactgacacatagtatgaagatctatgagtaaataatttattttaaagaaactttccccataaatctatcaacataaataatctcattatatgcattttcaggtggagtcagaaatttttaaaaaattactgtgaaaataaaaaagtgaaattctggcacaacttaagaatctgggtcctgtctgggcagtggtggtgcacacccttaatgccagcactcggaggctaaggcaggctgacctctgtgagtttgaggccaggctgatctacagagcaagttccaggacagccagggctacaaagaaaaaccctgtctcaacaacaacaacaaagattctgtcctgaagaaatccagtttataagcaggaatgttgaatgtacaaatgacctagacagttatttggaactaatcctttttcatttctccaattaaaaacatgcctttaatcccagaaatcgagaaacagaggcagagccatctctgatttggaggctagcctggtctacggatggagttccaggacagccaggactacacagagaggaaaccctgtctcaaaaaacaaaagtaaaaccaaaaacaaacaaacaaacaaacaaacaaaccaagatcacttaagacattaaaatttaaaactatccagatgtcaaaacaattggtctggttagctaatgaatgataaaactaaattccttttggcagcaccctgctatgtagtggaggccctgggctcacgtggtcctcctggctcaaccactgggatagttgtgactaccacatgggcctccacacctggccaattacttttaggcaggagaaacgacaattaaaatgaattatacgcctaagacatgagagtactagactacatacagtgagattccttaatccttcttctattcctaactactgatacaaatcactgatcaatgatgagctctagttgttcaatcaattctacggtgtgctattgtgagaaccaagtcctccgggtgagtgagtgaaacggcccttcagggagtcagtgcgtttttcacagactctggaactcggctggcgtagtactcgtaattcctcagtgcggccaggaccccagcagagttcatgtgcttcacctccttgttgtactgcagggcgttcccgtggatgtctgtcagcttccctgcagaggaacgcacaccaggttaatgtggcgtcgggtcaggatgcttctagggttcttccctgggggacaggagggggagcactgaacccggggctcacactaagcacatggtttactagtgagctgtgccctaacccactcgagttgttctttaatgactttgtagattaaatctacggtttcatgagcccttgataaacactctgccactgagctacatcccaagctctgtttctttttgtttttgaaaaaaagtctatgttgtccaggcttgacctttaataaaaaaatagttttaaaaaattatttcttttatatattacatcctaatggccgtttcccctccttccttccctcctatccactccctgccaggcacctttttaaacaagctctcactagctagccctggctggcttggaacttactaggtatcccaggctagcccagaacttgcagtgattttgcttgtacctcacaagttctaggattacagccttttccagccaggtaccctcctgcctccctcctgtatttggaagtagagactaaaccatgggcctcctgtatgccaaaggtgagctccgccactgaactactgccctatgctctttctttcttcttacttatatttaaatttatttaacctttattttatgtgcattggggtgaagacatcagatcccctggaactagagttacagacagttgtgacctgccatgtggatgctgggaattgaacccgggtcttctggaagaatagtcagtattcttaactgctcagccccattcttacttatttttttttaagatatttattcattagagttagggttaggaaaagatatttattttatgtgtctagagttttgtctgcatgtgtgtattatgtaccgcatgagtgcctggtgcccctggaggacagatgagagcaccatgtccactggaagtggaatcacagatggttttgaaacacccatgtggacactgggatctggaacctgagtcctctgcaagaacagccagcggccttaaccactgaaccatctctttagccacgtaatcaaacttcttggtatcaatttctcttactatatgatgtacttcccaaaacgttttctgtctgtctgtctgcctgtcttagggttactatcactatgatgaaacagcatgaccaagagcaacacggggaggaaagggttaatttgtcttacttgctctgaatcacaattcactgaggcagcagctgatgcccaggccatggggcgatgtttgccggcttgctctctatggatcactcagcctactctatttatttatttggtttttcgagacaggctttctctgtgtaacagttttggctgtcctggaactctctctctctctgtagaccaggctggccttgaactcactgagatccacttgcctctgcctttcaattgctaggattaaaggcatgcatcagcactgcctggctcagcctgctgtttttatagaactcagaaccaccagcccaggcatggtaccacccacaatgggctgggccctccccatcaatcgccaattaagaaactgccctataggcttgcctatagcccaatcttatggagacattttttcagttgaggctcccttctctcagcttgtgtctagatgacttaaaactagggcctcacacgtcagcctgatgctctaccatggagttataactaaccccacatccattttctaatcttttaaagacagggggttgactttaaaagaaatttattctctctctctctctctctctctctctctctctctctctgtgtgtgtgtgtgtgtgtgtgtgtgtgtgtgtgtgtgtgtgtgtgtatgagtgtggtagcaaatgtcagaggagacagatcgcagctggagctgcaggtggttgtcagccaccagatgtgggtgctgggaactgaattcatgtcctctggcaaagcaggaagtgctctgagtttctaagcctgggtcacataatgagtgcaaggccagccaaggctgcagtgaaaccttgtctccatgaaacagagaaacagcaacaacaacaaaatgagagtttgatttaactgtatgaagatgaaatccattctcactaaagactataaactacagaaaattcagtttgttgaaaatatctttgctgggcttccctccagtatcttcactctaggaatctaggggaagactgttaactgggggctggagggatggctcagcagttacagcattcttcatgactgtcctgccacaggacgtgggtttcattcccagcaaccacacaggaggcttacaactgtcagtaactccaattctaggtgatccaacaccctcttctggcctccaagggcaccaggcatgcatgtagcacattgacatacatgcagaccaaacacccacataaaattaccataaaaaagaatattactgaaatataatgcccgagtacaatataaaaactagagttctccaggattaactggactcacctcccacagcatgtaaaataacttccggggcacaagtatcccacttcttacagccaggactcgcaaatacataagcagaggccttgccttcaatcagctggatgatctgtaaggtgaaaagtactaattaccccaccaagtaaagaccaagctgccaaggagaagaactgctgatgcccacctcggacatttcaccagttcctgtcaggcttagattaaaagacaccagcattataaagaaataaaatgggtgaacaataataatacatactaatctaaacagaaaaaaataggaccaaataagccacaatctatagtccaagttagattaaactttcttattcacatggtttttctttcttactatagaggaaatacatattcactattggacaagtactgtttttaaatttctaaaaaactgtggccattgctaagtaatagagaactagtccatagcaccacgagggacaagcctggcaggtatgctgtgctggctagtctaccaggtactttcccagacttcagaacccttgctccttaattatgagtcattattatcgattggtattatttggtttccttgagacagaggctcctgtagtccaggctggcctcaaacttgacttacagccaaggataacctagaactcctgatcctcctgtgcccatctccccagtgcaggactgcaaatgtgcaacacacaccgggctgtgttttgcattcaactgtcttactggtgtctgtgaagactggactgaatagagaccactctggagggggcatctcgttcactgacagtgtatttcatgtgccgtggtaccttgtttcctgctcccccgactcgcagcacgttgtcggggttcatggctgaaacgcagtctgtgaccagcttgttgctatgggacctggtggttgtgatgatgtgcttcccagccggtgcctcttttagctgaaacccaaaggcacccaaacccagaactccccagatggtcctgcccagcacagcgtcagggcctgcctgtgcgaatgacaacaaagctcacgtcactggagaaagatgtcagccacagaggacacagtgatttaccaagtttgtaataatggatatatttttcagttacaaaagtaaaaacactcaatgttataaatataaggacagcaaagagacaaagaatttatcctgataataatttgattatccttattgctgttttctttggccaacagtttgaaagaaaggggacacttctgtcctcaggagagtgaccgtcctgctctgactgctgtttattttggaatcatccaccaatctgtctgttaaagtgaaaacaaccatttttctaaggtattgaagttccaggaagtgcaactctgtgctgatcattgttagagcaataatgctgtactcacacacagggtgctactttcattattcaagggataataggacactgagcaaacaaacaggctgacgttgcagaaagctatggacaggggagacaaggctaagattttaatgacagatgccctgattgaaaggacagcacaatcttagaatccgtgtcttcctttgtggagctcagagacgttgcaaccacattgctaaatacatagttcacgtaaataaacatagtttggaaaaattaaaattgattctaacacaagaagtccaaactcaacaagttttgaatcagccagggacatgtagtgtgagaacaggcatgtgactcattcagcaagagtgtgtcagggccacactacattctttatgcatccatcagcccatctgatactcagagcaacccagaaagtaaatcttaattatccttaacaatgaggcttagaatcagttaagaaactgactgaggagcctaggaagttgccctcaaaaccagctcatccagattcagagctctttttgttttattttgtttttggagatatggctaccctgaaactgtattaaatggggttggcctcaaaaagacctagtatgtatgtatgtatgtatgtatgtatgtatgtatgtatgcatgtatgtttggttttttgagaaaggatttctctgtgtagccttggctatcctggaactcaccctgtagaccagactagcctcgaactcagagatccacctgcctctgcatcctgagtgctgggattaaaggcatgtgccaccaacactcggcgaaaagacttatttttaatctatgtgttttagtgtttgcctacatgtgtgtatgtgcaccatgtgtgctcaaacttgggcatgaacagccaagtgggtgctgataatccaacccgggtcctctgcaggagcagccagtgctcccaactgctgggtcatctctgcagttctgcaaagctgttctgattttgctttgtgttgcttttgagatgggggtctcactgccttggcctgggtgaccttgacttctaagtaggcaggactacaggttagtgtcactgtccatcaaagcggacactgggcaacctgagctgacttgtccagttgttttcaaagtcaccagttagtcctcctagagaagtgcactggcactttcagggtataaccagcttatgctgcaggctgtgtgccccaggaagggccagggagtggctgtcatggagtgtgtgtgggatcagcacctgtgggcaaaggggaagcggggcacggtgtggccaggccacagctccggctgtgactgtgggggagcaccagagctcaagcagctcttcagagtggtcccaaatcaggaggaaatgccaggcttttccacacctgctctttctagtcagagtaaacagactgctttgggaagggttatgacctggggtagggaggctcttcacaggggaggctgactgttgactatgcctcctgccacggagcaacagaggaaccaaaccaagtacctgctgcttgggatgtcagcacgcctcctctctttcctcctgactctaccgtaggcctctcaatggcagccccagacgcccagaaggctgttgtgtaattcaacacttagaaagacaaacctgggcacagagtgagttccaggacagcatgaaaaacacaatgagagcgtgtttcaaaaagaaagagtcccatgggcaatggtgacaaacacctttaatcccagcactcagggcaaacggatctctgtgagttcgaggccaacctggtctacagagggaattccaggacagtcaggggtactcagagaaaactggtctcaaaaaacaaacaaacgaatgaacaaacaaaataaaaagagttcatactccctttgtgaatgactgggaagacaagaagatatgcctaaggaccctggtgtcctgctctcctctgggtgggctcttgatctcatgtatcctgttctttttttttttattattcccaagacaggatttctctgtagctttgtagaccaggctggtctccaactcacagagatccgcctgcctctgcctcccgagtgctgggattaaaggtgtgcgccaccacccgcgccatccatcctccccttccatatcctgttctcctgttctttcttgcaaaaactccacaggaaggttagggcttgtccttccagaggagatgctgctgttaactctggttaagaagctagctccaacacaaagacagatggagtttcatcagtcagtacttccagaatcagaaataaacttgcagttcctttaccttactcaagagagtattagagagtaaaagtagagtttgaaattcactttgaatcccagctctgctgtttccccaatgggtgacactgacaagttcagtacttcagtttcctctctctctctctctctctttctctctctctctctctctctctctctctctctctctctctgtctctgtctgtttgtctctctctctgtctctgtctgtctgtctgtctgtctctctctctctgtgtctctgtgtgtgtgtgtgtgtgtgtgtgtgtagtcgcgtgagtgtgcatgtgagttcatttctagggattgaacccagggccttgctcttgccaggaaggaactcgaccactgagctgtgtccccagccctcttgctttcttgctttttattttgtgacagtctcactttgttgctggctggtcttgagttcattctgtagcccaggcatccccagaacttgcaatgctctggccccggcttcctgagaatctgtgatcacaggcctgcaacagcaggtcagctagtgtgcttttctttaatgtggacataaccgcttccttaaggtgtgtggtgcgtgtcagaagcggtaacacatgtgaatcccttgcgcacagcagcacagtgagtgccccatacactgaggctctgatgcgtcttcggccttgaccaccggcagccaccaacctttccgtttctgcttgttgccacacattttaaggcatactcagaggcaaagagggcgaagaggacacagcacagggagacgaaggaagagtgctgggcaggaggaaatgaaccggctcacaggacgaaccggctgccacagtgcctgctctttcctccctagcactggaacccaagccctagctgcttctcaccttcgcttctttcctctgctcccttaacttctgcttttcattgctctgtggaaaatgaatacaagttttctagtctcggaaataagggatgaaaatcattaacaattcctaagttcttatatctctatttttgataaaaggggccatgcatgcctttttttttctttctatgcattaaatacccttcttttaaggaacagtgataaagtcccaaacccatgcccaagtgtactacagtccagacagcaaagccacactgtcaggattaacacccaaacatcccaaacatttcactctggctggactaacagtgtggagccactctggggaaccacaagaaataattacatttctaatctcgtaagcagcaggagcaaacagactcacgtcatacctaaatatgaagtctgttctcacatcagacattcaggagagatagccctcattctggttagcttgttttacaaagtttatcaagttcacattaatatgaaactttaagtattgtatttcaataaaattcagtgctatagtttttgccctgaaattatactggtcccttgtttctaaaggagacagcactccatagtacagcaggaagccagagcaggttggaagaaacaaagcaggagggaggagctacaagcatcagtgactggctacctggactgacagtgatccaggtactgcgcagcattaccggggaagcaacatggctagtgtctgttctttgttgacaaggttcattccctcagtgtgcttcaagaactacctgtaaaccaggtgtcctgatggtcacgccaatcgagaaccaagagggtcctttgcaaactattgcgactgaatcacaaacatatcaaaagtacagtgcacacgatctattcacccacatctacattcctggcccaatcccctcagaaaggtctaattcagttggtgaacagctgcctgggaggctgaaccttgagaggccccacccccaagtggctgctcgtgcaaatgagtgagtgagctaacaggtggactggatggcatctggactcactagaccactgtagctatgtatctatacttatgtgtcaccggtagcagtacctggtagttgtaatatggctggttgatgatgcctgcaatggcctttccttcataagcgatcccaataagaacagtcacattgtcaagaagacctatgaagaaaagaattaagtatgtcactctctcacggttaccaccagtacatcaaacagccatgagtctcattattagcatcattattttaatttttggcttttccagacagggtttctctgtgtagccctggctgttccagaactcattctccaagctggcctcgaattcctgccccctgaatgctaggattaaaggcatgtggcaccacccctgaatgctagttattcttgcagtaaaggtagggaattggcaatggttcacccacagcagtccctcgctctcccctaagggggctgctgcaggactgggatgaggggctgagaggacgctgagggactgagatgaggggctgagaggacgctgagggactggggtgagggggtgagaggacgctgagggactggggtgaggggctgagaggacgctgagggactgagacgaggggctgagaggacgctgagggactggggtgaggggctgagaggacgctgagggactggggtgagggggtgagaggacgctgagggactggggtgagggggtgagaggacgctgagggactggggtgagggactgagaggacgctgagggactgagatgaggggctgagaggacgctgagggactggggtgagggggtgagaggacgctgagggactggggtgaggggctgagaggaagctgagggactgagacgaggggctgagaggacgctgagggactggggtgaggggctgagaggacgctgagggactgagatgaggggctgagaggacgctgagggactgagatgaggggctgagaggacgctgagggactgagatgaggggctgagaggacgctgagggactggggtgagggggtgagaggacgctgagggactgagacgacgctgagggactgggatgagggggtgagaggacgctgagggactgggatgagggggtgagaggacgctgagggactgggatgaggggctgagaggacgctgagggaccggctgtggtggagctggggcagcacagccgtgcttgacatttttctaacccaagaaaacacagtcttctcacagtccctggggtaagaaggtttacagtgatggcgtctcccatgtggggacctcagaactggagctgatagagtacgtgggggtgggcatctgaagatgaactcttctagttggcactcatgcatgacaccagacagaacactgcaactcttcatctgatccagcaacagcacattcatgtgtcacagccctgcctcagcgctgtacgtgtggccaagagatactgaccttcggtgtattccttggtgccgtctaaggggtcaacccaaaccacaagctgcaaagtaaaaatgggaaaataagagagaggaaatattcttattatgcatgtaaaattcagagagaattaacagaagtacccccttttaatatgtttgaacacattattatagatggctaagtcaacaccatcagctttgtgattattaaaaaaaaaacccaaagcttcacaatcatggagcaagtccatttaaagtaaaccaaaggctgtttaagaacccttgccatggttttttaatacagctgataaatgttggccgccacttgaacactaagcatactgtcatgaactcaggtagctctagatggcgatatggggaaaaatttccacatggcactgagactttcaaacaatctaaggttgttactcattttatatttacatgccgattttttttttccttcttcagtgttttgagacagggtctctctacatatccctggctgtcatagaacttactacgtaaaccacgatggcctcaaactcacagatgcacctgcctctgcctctcaaatgctgggattaaaggcgtgcgccaccactccaggtctgtacgtgctgatttaaaacataaataaccctgtctcaaaaaaacaaaaacaaacaaacaaaaagctgggcagtggtggcgcacacctttaatctcagcacttgggaggcagaggcaggcagatctctgtgagttcaagaccagcctggtttacaagagctagttccaggacagcctccaaagccacagagaaaccctgtctcaaaaaaccaaaaacaaacaaacaaacagacaaaaagtttgattatcttaaggagggatcacaataacctaagaaaatggaatggctcatgaaacaggcactagactaaaagagaagtcccttccaacatgatttagaatatgcttgcacacgcactcagtaaactgagtatgaatttctgacacattcctgatgccatgtctcattatctttttattgctcttcccacagaaattcccacagaatttcttcctcatagtaattattctgtaagtgaaatcttaaataatttaaaactagaatcccccaggagctggagttacaggcagctgttagccacccagtgtggttgctgggaactgaacctggatcctcaccaagagcagccggtgctcttatctgccaacccatctctccactccattgcccacacaatgctttgttaccaaatctactgagcagcagaggagactttctcactaaaaatgcttttaatgatggtttcagagggcaggggaggcctacaggacaggaccgtgagctggggtcggccacgtgtctgtgtgatcctgctgcttctgctggctctggaggactctgagccaactccactactttgtaaccgcacactttcctcttacggacacaggctaacagagagcgcggagcatgaaggtgggccttacgtcttcctctttgatagcgctgtactgcgagggacacggctgcttcaggatttcctcccactgcccgtcttcaatcagctcttggtccacttcccccggaggcaggtcctgcagcagacacggggacactgctgaagccctctgcccccacaatgcatcctgtccctacccaaacggggcagctgggtccctagccacttctgttcacctcttatgcccagagcttttctggcaaacctagtgaaacacgagcaggagctggaggagatgaagtgaggaactaggatttccccaggagctactgccctaaattcaaaatgtgggcaccaggaaggggcacccccacagaagatctcacagttctgataacttaacctcatagctagattctagcttcatttaaaccatgattcaggaaaatctaggaggaaccacaatcacttttctctgtctaacattgtaaatgaatccgttttcctttacacatttctgtttcccagtttcctttggaatgctgggatactgaggcagtgggttatgaacctgggtgtctagttacagtaggactttcgatgcagctcagtgttacccagtgtgcaccagactgggtataactctgagcaccacaaaaaaaggggcaatgtgagtgaggacagaaaagcagaaaaaagtcttcttattggagcccagggcacctgtgatctcagcacttgactggtcaaagcggaagaattcaaggccagcctgggctccataatgagaccctgtcaaacaaacaccaaactaaaatcagaaacaagtcagggacgtcaataccgtgttttagtcttagagcaacagggcaagaacaaggagagagcaacagaaccaggaagtgaggaagtcagtgcattcctacttacagagaatatgatgctgtaagtgtcagaccctcatgattccaccaagaaactctgagaattggccaatactttctgcaaagtgccggaccaaaataatataaaacctgattacctcctctaggggatatgagcacttttgtgttcagactctagctccaatgccgagactataaccatgacatgggactcaatggcacggcggtcatgaatccacatggcacgggagctcttacctcctcccctattatggtcagcttagggaacttgcgtgccagggaagagcatatgctcatctgcaccaagcggtctgctttggtctgcaggtctgtggctgaggtctgtaacaaagaatgcaaatctcaatagaaatacaattaaggataaatggtcttcccacgcccaagtacacagtagtcatataatttacactatattttcagattttagattcagagcttaggcccaaatgaaaccactagttgtatgccctggagagatgcttctaagagaattaacagcaattaagactgggaagtgagggctggagagatggctcagtgcttcagagcactggctgttcctccagagctattgagtttaattaccagcaaccacatggtagctcacaggcacaacactgtgtacataatgaataaatctaaaaaaagactgggaagtgagctgggcattggtagcgcattcattctgcattcccagctccatgatggttcaagtttgtaaaggtactttttttttttttttttaaagatttatttatttatcatgtataaagtgtgtaccagcagagggcaccagatctcattacagttggttgtgagctaccatgtggttgctgggaattgaactcagaacctctggaacaaccagtgctcttaacccctgagccatctctccagccccagtaaaggtacttttaaattacctgggatatcttactctccagttgagaaattcttttataagattccagttaccaaccttcctcataggctaagagacaggaaactatgtaccagtgtacatacttcttataatctcatacttgaaaagcagaagcagcaggtttaccagaagtcctgtgccagcctggtatacactgtgagttccaggccagccagggcagcacaacaaaaccctatctcaaaatcaaaacaaacagaaaagaaatcaatttacacttgttttgaagtgaaaccaaatactccaacatcagtatgtgaacggcttcctctacaattcccccactcatccttgtaatgtcagaggtcctcaagatgattcactcatgcattagaaaggatttctggggttttttgggggggagggtgaggatggagatggggttgaggcaaagtctcgcatagctcaggctggccttgaacttctgaacctcttgccttcatctcccacatgctgggagaatggctatttggcaccacatgtgacttttatagctttgagtaagacgtatttatttaaacatcagatcttctcaaacatgttgtatgttctaaggttgcatggttttgtatggaatagactaggatctgttatggacagaagacccaatcatatatacaaagactttggatgcagtctggcatgattttcaaagcagatactgaaactaaggctcttgcgatctccatcattttattgttagttggtctagaacatgacattctttacctactacgaggacaaaaaccatgactgtagacaaggtttacagtaccttctgcacgatgcccaggtctccttcagcaatgacacacctgactatggtccctgccttctgggcaatagaatatgcagaggctaccagtcgcatcaatacggtgtggctggaagccatgataatccttaaggaaaggagaaaaaaagtttcattactttggagaccggctactggtttcaattaactgaattcaaaacgacacatatttactgaatgctttgattaactgtacaggaactttcctttttagacagtttctctgtgtagccctggctgtcctggaactcacaccctgtaacatgctttcttagccaacaaagcatttcaaagcctggggaaataaaatcagcaggtgaaaacattttgagtctgaggggtgagcagcacaaggggacttggatgctcacacagggtaaactgcaaagaggaactgggctgtagctctgtagcagagtcagccaccctatggaaggccccaccacccaggaggagcagaaaggatatgtgatagggttttagttggggggggatgggagagtgaagggaactgggattgtcatgtaaaacaatcttgtttctaattcaaattaaaaaatctgggaaaaaagaaaataaagtataattttcatgattttcactaagcttaaagtaaaaagaaaagaaaagaaaagaaaagaaaagaaaatggccatctatgtgatattttcgtatatcgtaatcaagctatgttgacttcttgacttactaggttttgcaggtgggataaaataagttatgatcattaacacaaataaaatccagaagtagtaatttaggaaaacatttccttgaacagccatctatgtaatgcactttgaactggaaaggtagtgccaggtcaccaaccttcccagtgccttttctgggggatgggatactgggaatcacatctaaggccctagagagccaagttctttctcatggagcgacacttgatttgccacatgcctaaatgctgacgggagtttaacttgtgggagtggtgacagagaagtacttttctctcacttttcatagagatcatttcccttaatccaattcagtaatcatttgagccttgttaggcttcgggcatgaccaatccacttcctcttaggcttgccacatatgcgcagacttttcttctgtcagaaaatttccaggctgtctgctcactaccttgcttaatagatgtacccaatgtttgtgaaccacaatttaaagagaacatcagtttgtaagatgtaagaatagaaatattactacccctccgggccctaacaattttcttgccatagttttaaaagaaatgtataccgttttgattctagtataaagaaaaagaaaaaaactatcaagcacaaaatgtgtaggagagattcttattagcctttccacttctgtcccagtcttccccagcaacccaagtgggaattacctttggcagtgacaggtgacttaagaacaaggctaacgatagccactaagttaacttccttaaagcagctcataaaaggaaaaacaaaaacaaacaacaacaacaacaaaacaccactctcttgcccatcttcctctgagttttacctgagcacttatgggaacatgacctttcacaagcttagctaaaaaaaaaccagcgtggtggctaaaggcagactctggaatcagctacctatgtccacatcctggcataagttagctttaggaaagccacctgactctccatccttgaacttataaatggggagaactgtacctattagtatagggttgttgtaattattaaaaaatactgtatggaaggtactgaccctacagataagcatcagagaacactggctaaacatatttcagtggtttcctctgttctggctacaacaaggacacacaggagtgtcaaaaacaaaaggtgaggggctgaagagagggctaacggttaagagcacacactgttctgaggaccagagctcagatcccagaacccatgtggaacagcttacgaacacttgtaactccacctccgagggaccacatgtccccttctggcctccatgggcacctgccctcctcatgagaccttacccacatacagacacacaggcatatgtacataacctgaatatgatttaaacgccctgcaggagttgcaggtccagcattccccagaaagataggcccatgtgaaaatacatggattaatagaaatgggttaataattaagacagagctagccaataagaaaccctagtcattggccaacatttcataattaatataatcatctgtgtgttcatttgggggctgactcggcagtaggcccaggctggtgggaagaatgctcctaacagatgagaatagcttggactagaggccaagtgacagaccagtcgggtctacaacgtaagaccatctcaaaacaaaacaaacaaaagcaaagaatagtcacaaaaagaagaatagcaaggctcaaatgactttctttttttttttcctcatagccttaaggtttcagggcaataacaacaacaacagcaacaacaacctgtatcttttttgtgctttgccttgagttcttacagggaggtagacatgcagattagggttttaagtgtctctagtaaaagcattagaataatttatctttggaacctggttaaatagtgctgaagttcaagataaaaatgagcatggtggagcagcacatgctgaacaattaataagagataccttgttaccagttatcaaaacataatagtcagctgggtgtggtgaccctgcttccagtctttgcacttgggaagctgagtcaggaggacttggaataacacaccaacgttagttacatagcaggttccaggctagctttggctgcctagtggggcaatgtttccagacaaccatgcatgcacacacatactctaaacaaaacaaaatgaatgtttggagaaactgtgtgtgtgacattagagagagagaggaagagagaaattgagagagagagagagagagagagagagagagagagagagagagagagagagagcgagcactggcgatagaactctggacctcatgcctgccaggcaactctaccaactgaacagtatctctcagtaaaatctcagaaatgaatccaaacatgagtggtatttcagccaggtggtggtggtggatctctgtgagttctaggtctacagagtgagctccaggagagccaagatcacacagagaaaccatgtctcgagaaaaaaaaaaaagtagtattttaaatacaggatgaagctgatgagtgtagtgacacttgtttatcacttaggaagcagaggcaggaagatcatggatttgaggctagcctggcctacaagacaagagcctgtctcaaaagaagaaagagaaagaacaaaaaagaaggaaagccacttgtacacaaatggcagggcaatcgctagagcttcaaaaacagttggatctttcttgcattcttaccaaatatgttccagagaaactgggaaaatggttcagctggttaaagagcttgccactaaacctgagaactgatttcaaatcaacacagtgggaagacagaactggctggttgtggtggcgcacgctggcagcatttgctgatggaggcagaggcaggaggatcataagttcaaggccaccctgggttacacattttaagtggatgggggagtggtggctcgagcctttaatcccagcacttggaaggcagaggcaggcaaatctctgtgagttcgagaccagcctggtctacaagagctagttccaggacagcctccaaagccacagagaaaccctgattcgaaaataccccccccccaaaaaaaacgagagaactgatccctgcaagtagccctcctccaccctctccccaaacacctgtggtacaagtgtctacacacacacacacacacacacacacacacacacacacacacacacacacacaccacacatgcacacagacactaaatgcattttttaaaataggttccaggtagtccagggtggaaacatactcctataatcccaaaattcaggaggctgaggtaagagtaccttgggtttgaagccagcctaagtttggtctttctcagtctgtttctctaatacgttttaattaaaagagtgaaaccataaaagtctaggcatgattttataaacttgtaaaaaggcctttgaaacataataaaactatgaattcataacagtatattaacaaattacacagaaattaaaacttctacatggccaaataccataagcaaagcaaagtcataactgataaaaggagacgtaagtcctgtaccgtacactaataactgaagttttatttggggctcttacacctcagtatataaaaggcgatactccagtgaaaaaaaggaggcaagaacaattgacaagcagttccctgaaaaagaaaagagctggccactaaacacacgattgtaatgctactgaatataaagggaatgcaaacttagatcctgagaagcgattaggattgcaagcctttgcccggtctgcaacgattgagaaaacaatgttcttactgaagcgagccatttaacaaaaacaaaacgtttatatcgctggatgcagctatgatattcctggggaaacgaatcacaagggcctgcacggtgttcggaaatgacaaccgaaagaatattggccattatgaagttccccaatctggacgcagtaagaagcgaacgtcaagcttcaccttgcggtttactcaatattaatcagttaggcagtgtcctccggaaggccaggcccagtaaacaccacatgcggccactcgagcttttagtcggggctgaactacaggcagggttcccacggggcgctcggcatcacagcccctggctctcctctcctcgcagccagcgggggcagttaccggaccaggagctccgagaccccccctgccgcagggacaaacttacacaaagccgcccgcgtccccaaactgctgtccctccgggccgctcgccacccgcgtccctgcttcctccaagtccacgggtccaatgtgcagagggagaagcggcagcgctcgccggaactcggcgcaggcgcacggcagccctcccgtgggatgctggcccgaggagaaacgcctctccacctcgtttttgctcaggtttacgccacctgtcgacaaagcctgagtccccgggacactcccggttgctggttcctggcgcctttgcttcacctgaacaagctcttgttggcggggtttaggtagcccaggctggccctgagccagccacacatcttcctaacttaggagcgactgcactggttcaccacgcctggcttgactttgcttttggatgaattgcccttatgggggttgttttcataaaagcaacaccccccccccttaaaatctcatgtcgttgttttgtgaggatggtaacgaatacattttgtttcttcctatgtgttttctgcaactctcaaactttagttacaagaagcgaaccatcacacacacacacacacacacacacacacacacacacacacagagagagagaagaagagagagagagagagagagagagagagagagagagagagagagagagggagggaattggggtctcacttatgggctggccttgaaatcatggcaatcttcctacctcagcttttcatatactgggataacagttataaacaaacaatcacacacctgtattttcacaagcaatgtcaacatttaccatttatatacagctatggttggaaaagacttgtacttccgtttactctgtgaatttagacataccttttgtgtgtggtgaaaatatccacaatatacaacctttaaaaccatacactgaagctgggcatagtggcttgagcctttaatcctagcactcgggagccagcctggtgtacaaagcaagttccaggacagccagggttacacatgtgtcagaaacaaagcaaacactggggctggtgagatggctcattgggcagttaagtgcacttgttctccctgaggacccggtttggttcccagcacccaccgcgaggctcacaaccatccaaaaccctagttccaggggaccccacactgtgagcaccaggcacacacacggtacacataaataaatgcaaagactcacacacataaaaaaatctaaaaataaatgacactcatacattgggttctgtaaatacaacgtacttgtgtaacaactgccataaataagcacaaataaaatctgtctcacgcatacagttccgtcagtgaaatgcagagttcacaggcactctgcattgattcttctcctagggtatcccagaaaacagaagagttgaattaatgcggcaagttgttctgtagaggtgtgtgtgtgtgtgtgtgtgtgtgtgtgtgtgtgtgtgtgtgtgtgtgtgtgtcggggagagtccgagtgtatgaatcttcatgccgctgtgggatgacagctgtcagtcagtctcccagatgggaaaatgccgttcaaagatgaagtgcattccatggtggtgcaaacacgaggactcacaaaaccacttaaattccagctggagaagcctggcatccccagagccagcgggttagtgagacaaaccgtgtgggtgagctctgggtttgctgggaagaccctaattccattgagtaaggtgtaagagctgtggaagatgagtcccagcatcaatctaggggctcaaagggacccacaccatgtgaactcacacatgcaaacatgcatgcatgcacgcacaccacacatgtacgtgaaatagaggaaagggtattgcacacagaacagtacatacaccagtctacttccccgttctcccaacacttgtgcaaacttcatcatgtttgttctgtgagatgactgtcctcctggctcccaaagttgagcatctttttacactggctttttgtttgtttgtttatgctcaccttttaccttttttctactttatcttggcttgtagtgagttttactttaaagtgtagcataggaatgacaaacttaacagctgtgagcatgtgtagccctggttgtcctggaactcactctacaggccacgctgtcctcgagctcgtagatcgccgacctcggcttcccagacgctgggattacatgcttgcatctgcaccaccaccaccacactgctttagtcccactacgccttatgtgtaggaccccggacatgtcgcttaactcgagcgtctgactagggacagccgactgatggcgggaccctggctacccttgcgtgacctcggggaaggtccggagtggtgcacacctccaacccggaaggcccgcccttagccacgccccttccgtccccgggcgcgtgcgcggttgcaggcggctgcgttcttcgggggtcccagcctttcggtcccgggctgctgcggtgcgccgcgagcggaggagtccgcctgggtcgcccaccatgcgttgggggctgcgccctcacgggcccggggcggcggcgctggccgctgccgggagcttctggaggccggcccgctgtcccggccgcctggggtgcccgggagtgacgaggaggctggtggtgcggtcggtggcgggggcggacagcccccagagcagcgcgaaccgcggcagataccgcgacacggtgctgctgccgcagaccagcttccccatgaagctgctgggccgccagcagcccgacatggagctggagatccagcaggtaccgggcgcggccaccgggccgggccggggcggggcgggggcggccagctcggcggcatcccccggccgccgccgtcaccacacacacgggccggcgtccccagcggcgcgccgtgcacgtcccgatttccgcaccaggcgggtcagaaagtaaccagcgtgtaaataaatgaaaatccaagtgtggcctggagagatgacccagcgcttcttcagagcgcttgccgccggtgccgaggctctgagttgggttccccgcgcacaaatccagcagatcaccaccacctgtcgtaactcgagctcccaaagaaccagctcctctgcccccgccggccggcacctgcactcccatgcgccacacaaataattaaaaccaacaaacaaaaataagtcttgaagcgatcattcaagtgttagcaaagcggggaagttgaagcccactttagttacctgtttaggcctctcgctggaatcgtgactcctttgctggacaaagtagcaatccttctctgagtcccctatgtaggctgcttgtctgtctgctgtatcgtactcaaatttgctcgtggatgagactcacgtgttagtgcctataacattagtctttaaaatatcccggatagctaggaatgctgttttaagtgaataagttagcctgaatagtctttggatttagggaaggattgaggccaaagaatagcaagaataagctagagtgttggggggggggtgctggggttgacaggtccttcagcagggctggattgagggagtggttactgagagactagccaaggatttagagtcctgccacggaaaagtgtagacgttattctgaattattgtagagggcagggaagactgttgaaggtgtttaatactggttcctttcagaagtgtttccagttagatttctgagttgaatgagttggaatgggatcattgttagtcaggcatctgtactggcctgtccttcgggttctgacaggatttgccctctgctgcagccactaagagcaccacctgtgcatgtgcacattcactatgttcccttttaaaagggccctgcccatctcccatcctcctctttttctctcactctctctgcgtccccccccccccccccggtctccccctctttcctttctcctctctcctgctcctgtctttggaggccggtctcaccccaccccccttccctttcccctttccctaataaaaaaccaaacaaacaaaaaactcctctgcttaaattcagttgtatggcatctttctctcgtgcaccgattctgttaaattacaacaatcagtaataaccaagtattcaggagattccataacatgtgtttagatgatatgtaaacattgactttttttttttaacagaaatgtgggttttcagagctttattcctggcaacgagaaagaaaaggaaagacagaattttgtcttcatgatggacctccttatgcaaatggtgaccctcatattgggcatgctttaaacaaggtaattataatttaggttataaaactgggaagtaaatactctgtaaaagagcgtatgctacttgcatgataatttcgaagtactttaccgggagctgcatcctggtgtgtgtgtgtgtgtgtgtgtgtgtgtgtgtgtgtgtgtgtgtgtgtgtgtggttggtgttgagtgtgtgtgtgtatatgtgtggtgtgtgtgtgtgtgtgtgtgtgtgtgtggttggtgtgtctgtgtgtgtgtgtgtgtgtgtgtgtgtggtttgtgtgtgtatatgtgtgtgtgtggtgtgtgtggttggggtgtgtgtagttggtgtgagtgtgtgagtggttgtgtgtgtgtgtgtgtgtgtgtgtgttgtggatgtaacccatgggggacacgctcctgttgctgcctgccatccccactgtagcccgcactggacacattagtatacaatgcacagttttgatgctgcatgaacattaacattgccaggctttcagctttttaatttaaatttcactttattcattacttcctgtttatgtgtcatgaattattctgtactccaggtaggggaaaaatagtcacatctcttctttaacgctctaccgggaagataaattagtaagatgtgtaaaccgtgataatctggacagtgataatacctggggagggaacaaaactggaaaggagagaaaatagggagaatcattgctgaagctaatgtttaaaatattctattttattttacgcatcagagtgctttgcctgcgtgcacttgcctaatgcctacaggggccagaagagagctcaaagatgccctggaacttggagtgaaagatgattgtgagctaccatgtgggtgcctggcttctctggaagagtagctggtgcttgtaacagctaagccatctctccagccctggagctgtaattttcataaatggatttgggatggctctttaacgggaaaggtgaaattatggggaataattaagagagcaagtgagagtccagtgtgctggtgttggcctgcattccgacgcatggtagttgaactagtaggattagtgaacatttgaggccagtctaggactagagttaaaacctgtctcaaaaacagacaaaggaaacaaaatatcccaaataggtaagaatagcaagtgcagggcttgtgatgtttgttttgttttggctcatctaaggaataatcagacaacataggcagtgcaggaaggtagaaagttagatatggctacagatgcaggtcatgtagtccattcaaaggactttgggctccggtctgtgaataccagtgagcctttggccttcggggtcagacagttgagtagatacactcaatatctgatttattgataatttactatgactttgaacattcctttggtgggattagtaggatcattttaggctgttgtgttggtgacagtgttgaggttaaggagtctgcaggcagagagaccagatgatgacaacagtgtcattgacagttggagccacagaagcaaagagataccagatttggagtgcattccgatggtggggctgttggaccacactctatcaggagaaagagagagtcaaggatgcttcagagaactttgacttggaatacgtaggccagtgtttctctaatttgatagggaaatgggtggggtggggtagggtagggtagggtagtgtttggagaggaggagttcggacctgggcaggtgaagaagatgccgggaattcagagaagttaagaccgactctgctatgcagtcaaccagcacagagtctggagctggtgtttttgtttctgaggcaggagtaggctctgagaggactcatctggtcacttctgcttccgactgttagagcagaagctgcagttgtcatcatgagtatatgggataatggtggtgactgcttcccagggagaattgttcttattacagcctaattatcagttcatcttcctttactttgtaaaaaaatgtgtgtgcgtgcatccatggtggaggtcagggcagctaactctagaaggccctaagagattgttggttttttggttttgtcttttacaaatgatttatttatttatttcttaagatttatttattttatgtatgagtgctttatctcattacagatcgttgtaagccaccatgtggttgctgggaattgaactcaggacctctggaagagtagtcagtgctcttaactgctgagccatcttaccagcccatcttttacaaatgaagcagttttattttatatttatgcctttttgtggcttggcttgagtgctccttttcaatttagaagtgtatttgggttgtgcacatgtgtgttttattttctaacatacttgtaaaaacaaaagagacttctataggactttatttttttgtttggttttgattctggaggtcaagaccacggtgctgcttatgtgaagcactagatctccaagctgtacttgaaaggattttctgttattgatcaaattctcctttgtgacagatgtacagtattagtactatatcttttttacttgacacttttataactgtgttctgttgttttcctaattattgctgccttcctaagctacggctatcctgttccgaaactgccactccgagcaagagttgaaaccttgagggaattctgctccctcaggcaccaattctttcaagctattaaaaaacttatataatctctgtcctgctaaagaactcaaattcaaaggttgaggtagattcctgcttcccaagagggtagactgcaagcagctcacctagctcatccctttgactctcccaagaagtccttgtgctggtcttcgcccctccttataaacccttctccacctgcttctccctgcagcttcctgtcagctggttgctgacccaacttcctaaccgcaggtgaattttatttaatcaaacacatctttgcatcattaaacaaatgttccagagcacaaacaaaagtaatacactttaaaataatgttccacttttttgtttgtttgtttgtttgagacttaatctctttagtagcctgagctggcctcagactcatggtccttctcagaataccgccattgcacatgtgcaccattaccccagtatgtccacaaaattgataagctcattgcatttaaaattatacctacttgattttaaaatatattgacttatttgcatggggagagcacaagttccacagtgtgtacatgggagtcagaacagcttgagggagttcattctccccttctgtggagctggaaagactgaagtcagtgccacatgcaccaagcatacaggattgattccaaaaaatgcaaaactaccataacccatcctcacacccaccccacccccatgcctgctggggaccctgtcaaaggcatggggaatctctggggatttggtcttggtcctcctcaggcagtgtgatctcacctactttctcctgcctggtgtgcatttcccaggggacaaaaatgactcacgttctctgttgtgaaatcttaccttctaaagtaataccaccccaaccccaaaaattattttccagccctttaacatgattttcactacctagtgagtgtatgtaacaatataatttagttttctgctggaaaatgagacttgtcctccctgtttactgctgtctcctggggacctggaacaatttgtggctcagtaagaatatctgagataggaaaatgaaatgtgctgtcttagttacttctcttttgctgtgacaaaaataccatgaccaaaacaactataaaataaagagttgcagggcgatggtggcgacgcctttaataatcccagcactcaggaggcagaggcaggtggatttctgagttggagaccagcccggtcttcaagagctagttccaggacagcctctaaagccacagagaaaccctgtctcgaactgcccccacccaaaaagagtttgtttggggacttaacagttcatgaccttcccggtggggagtatagcttacatatctcacaacgtgtgtgtgtgtgtgtgtgtatacacatactctcacacattcacacacacactctcacaaactcactcttatccatgctgggattgaaccctggggctgtgcacagaggagtactctaatgctgagtgtaggttaaccttgctgtcactccagctcaggcaggccttgaacctgggatcctcctgctttagccaactgtggcctccataaaagctgtgaccttttccctccagcctggctggtagcacattttttaaaaagtctgccttcttgtttctaaaatgatctaagaagggtaactcggttgctcacatgcctgctaatgagacctgctgcttagccagggccttgttagaacagcagtcaagcatggattccttccacacagtatgtgagttctgcccgagtctgtttctcggcaaacgtgaacaacatgcattacattgtctgttagttttcccttaagcaaaaccaaaatttctaactgacttacttaaattctggagggtagaaggtcaaaagtatttcttttcttttttctttcttgtttgtttgtttttcgagacagggtttctctgtgtagctttggagcctatcctggcactcgctctggagaccaggcctctgcctcccgagtgctgggattaaaggcatgccccaccaccgcccagctcaaaagtatttctttaaaaggtagaatgggctgacactattcccccagcttgacgaagaattaaatttggggcatagtggttatcatgtataattttcttaatttgattttttcccccttgatagtattaatattgtgaaattcaaatatttgttatttctgtataaatatcacaggttaattagtagatttaatcggttattttatagaaactctataacttggactttatgctttcaaatgatgcgatgtgtgttttctgggtggtgattgcgcttccatccctgcagattttgaaagacattgccaatcgataccatatgatgagaggctctaaagtgcattttgtgcctggctgggattgccacgggttgcctattgagacaaaagtgttatcagagcttggtgtgagcgctcagactctttcagccatggaaatcagagagaaaggtaaactccatttttgtcttttacagtgatattgtaagtgctcggcctcgtctaagcccagggcgctgcctgtagcaggtctttcttgtctgactttctttaaactgacacccacataatgacacagatgcaagcatgagttttctggtccagcaggtccccaggccattgtcctacagcctcgtcagccccaaatgaacacttatgttaattataaaactgttggctgatgactagggcttcttattggccagctctgtcttaattattaacccatttctatcaatctgtgtattgccacgaggctgaggcttacccactaatgcccagcgtggtgttactcctctggcagcatttcgactctgtctggccggctcactctacttacctttcccagaatcctcctcctcctcttctagacttgcctatcttgctgccctattggccaacagtgttttattcatcaaccaataagacaaatatatacagaagagagccctctatgcacctgtgtcgctgaccacgcccatttgggcgtggccacaggtgcaaaaaatgcacgtgggatgaagatcaggggagaggggccttggaggctcttggagagctgctgagagcgccaatctgggtcatccgtgtaagaggtttcaccttaataaattaaccgtctgtatccatattccatgcacaattaacttcctcaacagacagccccatcatctctttcctgtctaaataaaatgaaaggttttcacttttttaaatgttttcatttatatgtgggttttttttatatttttatatgtggttttattttatttatttatttattatgtatacaacattgtgcttccatgtatatctgcacaccagaagagggcaccagatctcataacggatggttgtgagccaccatgtggttgctgggaattgaactcgggacctctggaagagctgtcagtgctcttaacctctgagccatctccccagcccaaaaggttttcactttaacatagtcaaattgtatataacaaaacagttattaagcaagaaatatatttacaatatttagttgattaacatttagaaagaatattctgtcatctatctttgtgagtctcaagtcttatatataacttatcttttgtcataactaagggaaaccataactataactgtcttcaactcctgtataaactctagaattgacagagacatctcgctacctggacagccacccgaagttcttctgtaatattggggtgtccatcttcagcctacaggcctagtgtgtttggcagacttctcagtgaagcaagaaatttgaaactgtccgcctgggttggcagtttgtcagtcacttttctctgtgtcctgcagaatgtcggcctactccccatgaagcaggaaccctgcaggactgtcccatctttgacaaattcagcagtcactttcctgtgggtcctgcatgtccaccttacgcagcatacagtcaaacagtccaggcaagaatggttacttgcccaaatggctagttctgccatgttgaaactcaataatgagttttttgatgcccatcttcctctttgaagtaattggttttttccaggagcagttgtgtctcattgtcatgaaaaaccctaaaccattttaaatgccatattctgtgggtctttgaaaggtttgaagaatatccatctcaagtatatctctgtatatctagaaaacctaattaacctaagttttgactattataggtgactatatataatctgtatttttatgtattacatttttaagcaatctgtataaacacaataccaaaacaagaggcgaaatatacatataacaaaattggccttaaatttgtatcaataaaccaaaatccatgccaatataaaatattcatttctatatcatattccccttttttcctttaaaaagagatcagttgtgatccttaatcatttatagccaaccaagtttaaatgaaaacaaacgtttataaacaatttttgggattttgggtgtcgttctcttcaaactttctgctgtctggggacactgtcatgggtctcatgagaaaaccgaaacttctacaaatcctgcctgtactggtctgtgagactgcttcagttcagctgttttagatgctggatcacctggccattgtttcagggggtgttgcttcatcaaaccatattagtctggaaggaattcacagcttttcattttttatggaaacaaaaaaggaacctcttttcccaagtaagtgtctttatacttaaatttagaagtcaaagcattttcaaaatatatgttggattaatctagcatttatttatttatttatttatttatttatttatttatttatttgatgcaaacatcatgaggctttattatagtttaatgagctaaccccatgttagctcaggtcttttatccacctgccatggtggatggctagaaaagacagctcgaagcttctgcacagagatcttatagggcagcgtaaggggagtgtttaggggtacgcacaggctcagggttggtgtgcctctaggcttagagggtttgccctgtgttgattggtcaactggttgttatggcccataggccttcccagggtggttgctatgttctgtacgtctctgctgtgcatttgtccataaagcacacccagagccataaagcatagcaccaccagctaacttctgattggttccttgctacaaggcaggcatctaaccacctagtgactaagacaaggtcagacaagcacgtgtttggctgttatggctaccaaaatggggagctggtcccttcattcccccaatttttttgttttttttttttttaaattccaatcttggaattgctgtctctccagcatccccatcagggagtgcgagatattggcatccccatgcaagggagctccttctgacttagtatttcaaccagggaaaatgagcgacagacgtattcattcccattctacttcctgctgactttgggacgaagttagggacccaagcaggctgaaatgctagtcaaaagcaaaaaagggaatttaggcaatggggattccatcaggagttgttggcagactcttttccagcagcatttataatcaaatgtcttttagcagtagttcctatttcctcagcagtcaaaaaattcaaagataacagaatatatacagtatccaggctctgtattttctatctttatttacatggctttttttattactcttacttattttttcctgttttgagacagagtttctctatgtaactttggctacccttgaactcggtataccaggctggccctgaaatcacagagatctgctttacctctgcctcctgagtgctgggattaaaggcatgtgtcaccactgcccagttactctattccttttttaaccagtgtcccttttttttctcccaagcctacatatatttttgtttttaaacacactacaaatctttatctttttctaaccttgagtcttaatctgctaggattaaaggggatgtttagctgctgcctttccaatatagtaggcgaaagtttaccaccagtactgggagctgtgctcactgccttgactcttaaccctttatgagtaaaagctaaatctgtcatgcagtgtgctggtaattggtgccgccagcttctcatacacaccagtttttgtttggtagcagggcctcttaaaagagccctgtgttgttttgttttgttttcttttttttttttttcttatgctgagtcaggaaacctcccttaaaggagccacgtgagtttctgcttgtctctaacaaaacagagcccgcccaagaaaatgctgctaccaagaagccatccttgtctgtgttctattgtttctaaaaatccctttttaagctcttatcagattctacatggaatttgtgtctcatgttgctggcgccattttattacagatggttcttcctgccatcaccggagtgccggaattaaaggcatgagaaaaattttgcccagcaaaattccattcaattaaaaaaaaattgttctatgttttgaatactttcaagtaatcttcctgctaagaatttttcatgagctgggcagtgatggcacatgcctttaatcccagcacttgggaggcagaggcaggtggatctctgagttcaaagccagcctggtctacagagctagttccagtatagctagggctgttaacaccttgtctcgaacaaacaaaggaaaaaaaccaccaattgttcatgggcctgggctcagtagaaagagtgcttgtctggtgtgcatggggccctgtgctccaggcccagcactgcaggtatggagagtaagtatattcctgtacgcctagctttagaggatcaaacattgctacaaagtgagttggagattagcccagggaaataagggtttttctgtcttaactatgtataacaccttcacctagagaagcatgtaacaggtcatgtttaagaatataaaaagttagccaggcgttggtggagcatgcctttagtcccagcactcaggaggcagaggcagtcggatctctgtgagttcaagggcaaaagtgaattccatgacagccagaactgtaacacagaggaaccctgtcttgaaaaaccaaaaacaaagtgaaacaaaataaaaagaatataaaaagtcagtctcgtggctcatcctcataatcctgccacttggtagtctgaggcaggagaattgctgtgagtttggggtcagtctgacctctgagctatataatgagtttaggccaagctgggtttttcaaaggctttttctttttcctctgttgtcttttctagctagatcatttgctaaagcagccattgaaaagcagaagtctgcatttgctcgttggggagtgatggcagattggaataactgctactatacatttgatgcaaagtatgaagccaaacagctgagactgttttaccaaatgtatgataaggtaatgaagtaatttttttcttcccagtgtattaaagtacatgtcacaaacatttcagcctcagtattgtctcagttttcttttcctatgatgggaagccatgaccaaaggcaacttggggaggaaagggtttatttgacttaaggtctccatcatagtccattgaaggaagccaaggcagggacctgtggcaggaactgaagcagagaccatggaggatgttgcctactgtctggttccctggggttttgctcagcttttttcttacagaacccaggactacctgccctggagtggtactgcccaccatggactgggcccttctatgtccactgttaatcacgaaaatgcctttatagacctgcctacaggccaatctggaggaggcattttctcaattaatactctcttttttccagatttatgttaaattgacaaaaaccaaccagcacaaatatcccatttttgtcttttatagggcttggtttatcgatcttacaaaccagtattttggtcgccctcatcaaggtgtgtatgtattctctggtaattaaaaggttggaaacatttgtgaagctcccacgtgtttatgtatgacactttaacatcttaggaccgcgctggctgaagcagaactcgagtacaaccctgagcacgtcagccggtcgatatatgtaagattccctctcttgcaacctcctcctaagctggcatctctcacaggtaggcttagccagagcttgagtttgttcatgttatggaattattacggttgctagcatatttacaactctactcccacagatggctcatcccccgttagctttttaatctggaccacccagccttggacgatccctgccaatcaggctgtttgctatatgccagaagcaaagtaggtggttggttgtatcttcttactttatccacaaataggatccatgttaaatttatttcactctcgtgacccttttaaaatatagtagattatcacttatttaagtttatacggctgttacaatgctctagaatagaggatccattggaagacctttcagctgttttgggaaagtgaaataagtgtgaagtctggagtgctctctaaacgactctctgagcctgaagttcatttttctaaagtgatgccatttaactatggacgtctttcttcatcatgggtgatttactctgaatttcattcatattcaggtatgctgttgtgaaatgttcctcttctggagatatctacattctggctgaagataaaatatcacctgttgcttctgccttggaaacaacatttgaagttatttcaacattttcaggtgagtatttatagatgttgtccaactatcagtcattaaaatactgacttgattggcatttaatcgtttcttgcatattctcctttgtgaattgaagcagatatgacatccatgtttctaagggaagaaataaagaagtatatgaaatttgtttatttgagacagaatcttactatgcagaccagactggcctcaaactaactcacagagatccacctgcctctgcctctcaagtgcttggattaaaggtgtgggccatcacgactgttgtcaaaggcaatacttctgtcagaagaatcttttatgagtaataatttgggacttcaacacatcactaattttatataactctggaagtctggagataattaaaattaattgcaatccttagagatgattatgtcttgagttaattgcttaaaagcaattttatagtaaatataacttaaaaaaaaatagaatgaccacttagctaaagaagaaaaccctcttacgttcatcacttaggtgtaagacaattagaaggaaaaacacacaaccctatcagaataaaaaaaggaagtaagaggcaggtagggagctggggtttttaagatcactggtcctcactggtgcagtaggtaagctagagaaatccagtctgtacccttttcttgagggcttgctcagtaagcctggagcgtgctcagtgagcgcatcaccactggttacacccagttcctttttatgctcattatgagacagggccttgttgggtttccttggactccatttgattatgtatttgctgtaacagacatcaacagatagctgatagtatttttaattattgattgtgaggcagtgtcatgtctaagtgcttatcctaacagtggtgctctcaacaggggctgtgactatctgcgttctagagacgcctggacatcatgaatcagagggagtccagttttgagtgcagcaagtcttgtacttggttttattctgttggagatctaagtagctcaggggcatagcacttggcctcacatgtgccaggcctcaggtttcattcccagaacaaggaagtaaggtgctagctgggtgtagcagtgcacacctattatcctagcaaatgatcagtgggaacaagaggatcagctgtttaaggtcatccctagctgtatggcgaatctgagatcagcctgagctctgtaagagatcccccccccctctctctctctctctctctctctctcacacacacacacacacaaaagatttgatgatttgatgagggttgatcccagggcatcatacacagaaagactgctctgccactcggctgtagcctagcccttcttgtaaaacatttcttagtgcttttcttgacctgcaggtgtggatctagaaggtggtacttgtagtcacccattaattcccgataaagtgtctcctcttttacctgccactcatgtgaccatggccaaaggaacgggattggttcacacagccccagctcacggtatggaagattacagcgtagcgtctcagcacaacctccctatggtactattcctctttttttccttttaattattcaccttgcagaaagaaaatgattactcctaagtagcatctttgtttcttggtaatgacaattcttgtcatcatagttaatttgtgaaatgattacatttgtgcaacatcctaaaacattattaatctatgctaattaagaaagttcccagaattagcacaaaatctgaacagaattagatctgaagaatatgcagcattacacgaatgcactttaaaaatatacacacgccatgttcaattgtgtgtcactttattgcactttggagatgtgcatattttaataatttgtgttgagcgagtccagcacaacttttttaaagttactaaattattttaatgtgtggtttttttaattttttttttttgcctgcatgtatgtctgtgtaccatgtgtgtgcctggtaaccttggatggcagaagaggccactagatttcctggagctggagttatagatggttgtgagctgccagatgggctaaaccatgtttctaacagctcagatatgacccttaacagttttagcaaaaaagtgttttgtaattgaggtgggtacatttttttaaaacacactgagtgtgcacacttaatagcctatagcatagcttaggcccaatccttatttgtactggaagctggattgttgatacagttgatgcagttggctctgcttgcccgttggctttcctgccattcacattttttcacagtggtcttgaaccaaactagggtacctaggccgagtgttgagccatgtaggtacattgctttcacaccccaaacaatgataattaaatgtcattaagcagttagaggggatggttgaactttgccctttccaaactcctaagcttagttacacactttacttagctacctttgccatttggttaagaagggcacaggcgaagaacggttatacttggccagtgatctagacatgagagagactggttaaaagtgttttagaatacttgtactttccagtgttaaactttaggtatgtgctttagtgatacgttttgtctttggtggtttaaatatgtaaaattcaggaatctattgactgaggcagaaaaacccagatttttaaagtagagaacaggtagactctgtaatgagatgctttaaatacgttgttttaccgtagattgccataagctaaagtgactcgatgccttaactgcttaaaatggtccattgtaggactgtttagtggatgaagatggagtgttcaccgatgctgcaggccctgaacttgagaacaaggctgtacttgaagagggaacagatgtgggtaggtgttatctgttgatagcccaggatatttctggaagggaccagcagcaagacccctcatcttttcagtcagactgtacccttccagtcagatggaccctcatttggttagccacattgttcacaatgccgcatagggcctactgtgttttgtttcagatctgttctagttgtctgtgcaaatacagacagtcactaagtagcggtttgtggagggaggcgttacagagatcatcagcatattacttttgtaagggtagaaatcgagcttgggtagatgctgcctgtgaaccaggcattccctgccctgtcagtaagctctgcaagtagcccatcaggtggaggccttcagtcttgaattgtcccttctgtgttgatgggttgtgactcaggtgtgtggtgctatgtctttgccccttccatagctgggacgggccgctttcattggcacctgggcccctcccagaggcctcagaatacttgtaagctatgtctgatgatagaaattgttttaagttataaagatgctccagactgcaaagcatttgttgaaagaagagaaggtggtgcacagctatccctgtgactggagaactaagaaacctgtggtgattcgggccagcaagcagtggtttatcaacatcaaggacatcaaggctacagctaaggtaggaaaggcctcctgcttaggccatgtgctctgagggttgggctggtcattcccacagtaaaactgggtgtgtgtatgtgtgtgctagtgagggggctttataaaagaattatgattcattatgaattattttcctaaaattgtatacttttggttccttcattatacatatgtaaaactaaggtttaaagaggctaagtgactcatctggtcactttttgtccagtgtcttaaaagtagcctaggctgaggcagaacttggccagtagtgtgtaacctcctagcaccttagctctgtcactctttaccctgctgaagccagaaagtcagctcccacatccatgtccgccactctcccacatgacacacatttagtgaaatttttgtgtcctttgtagccttgaaattaaggctgctaaaaagaaggaagcaaaacaaaattttgatccacttaaaaatttgttgtgatgctagggagatgactcagtgatttagagcactggctactcttgcagagaacgtgggtttggttcctagcccccactccaggcttctcgaaactgcctataacccttgccctaggggttctcatgccctcttcaggcattgcatgcacgtgtgtacacacacacacacacacacacacacacacacacacacacacacactttttaaaatgttgctatgcattaactagttttataattgatgttgcagtttttttttttttttttttttttttaaagattttatttatttattatgtatacagcattctgcttccatgtatatctgcacaccagaagagggcaccagatctcataacggatggttgtgagccaccatgtggttgctgggaattgaaatcatgacctctggaagagtagtcagtgctctcaacctctgagccatctctccagccccaatgttgcaggtttttaagctctttatttaatacacctggccatatatatgtttttacccacattgatgcatattccgaaaacagctgattctattgaatgaaaagttcaagtgtatattcagtaaccaggctgaatacacagataatttgcttggcagcttgcagctgaagcactgatgtagccagccagttcgttcattggcttaataattaattaattaattaattaattggcttgataattaaggtccttctcagaactgtgtgcaggagttcattctttttacacttgtataaataggcatgtgacatgttgtgtttattttgttttatttttcatttccatagtgataagtctggttttttgggttgttgtttgcttatttgcatgaattttttttttttttgagacctcattacataccttctgctgccaggcattcactatgtaggccaggctagcctcaaaattgtggcaggactcctgtcttagcctcctaagtgctgggattctagccatatgttagtccatatgtccagctgtctgttcttgacagtggtgagatcagtgtctgctggcacactttgaagcctttgcttttctgtaattttgcctgtggtgggaatgggagggatgtgagtggctgcacacatttggaacgaagagctgtgttaggaaaagtcaggacagtttttaagaattggttctgcttctctcacttgacctgacgatgaatgaattgcaggagttgttgaaaacagtgaagtttattcccggagcggcgctgaatggcatggttgacttgctggacaggcggccatactggtgtatatcaaggcagagagcttggggtgttccaatccccgtgtttcatcataagacaaaagatgaatatttgatcaacaggtaattcttttctgtttattgtttgcgttttttgtgtaccattaataattccctgttagtgctcatttactctggttttgagatggtctttgagtatgagtccaggctgacctcaaaggcctgggtccaagtaattgtgcttcccccttctaaatagctgggttacagatgtgtgccactgttttcatctctctccacctccttccgtctcaccatgtagctctggctgctctgctgcagtctccagcttatagtagctgtcctgcctcccttcctagtgctgggatgtaggcatgtcccagctcccctgcaacggtcccattgttgctgagctgagtgatccagtagtcaggatgactggggattgggacaggattataaattaaggccaagagcagaaagtctacgtaagttaccaggtggtatgctctctgttttaatgaactgatgaggtcatttctatgctgttctagctgtcagcaagtctagattgttgctgttttgttgtttgttctctcctccatgccgccgccacccccgtgtgtgtgtgtgtgtgtgtgtgtgtgtgtgtgtgagagagagagagaggggggggggtgttctgggattaagtctgtgtctccacaccccagcttcttgttgctgttttaacagaggtggaaagggagatgtgaatcatttctattaggaatttattctaggttttcattttcttagaatgctttggcctaattggttaatgagacgttactaaattatgctacagcattggtgacattggctgtgtttgtttagttgaggatctattggggagcttgaggaagagaggcaacagtgatggggagtttgagagacgtaggcacagcctgggcagcccttgcttggattccttggcattgtagatggtctgcttttgtggttactatgattgtatgtccttaacagtgccttactatttagacattttaaactatgttgatttaagttgctttttttaaaaattaatctttatttaaattaaacaattttattttacaaaccaatcccagttccttcttcccccatcttcccatgccctccaccaatccctcattctaccccccacccccacccactacttagggagggtgaggcctcccatggggatcatcaaagtctgtcacatcatttggggcaggacctaggccttcccctgtgtatctaggctgatagagtatccttccatagggaatgggctcctaaagcccatttatgcactagggataaatactgatctgctgccagaggccccatagactgtccaggcctcctaactgacacccacattcggggggcctgggtcggtcttttgctggttccccagctgtcagactggggtcagtgagctcctgcttgttcaggtcagcggcttctgtgggtttccccagcttggtcttgacccctttgctcatcactcctccctctctgcaactgggttccaggagtttggcttaagttgctttttaaaaagttatctgtggtcatgtaaagaataggcttgttgctgtttccaatacttttgtgctgggaattgtatcaaggccctgcacgtgctacggctgagctacactctaagccctggcagtttactgtttatgttttatgacggggaagctattggtgtcttttgtgtgcatgctctttttgactttgctgtcatatcctgaggaacttggttcaaagagaacaagagcatctgccttgctcactggcttcattcacagaatgttcagcatttcagctgaacgtggggaagagtgttctgcagccgtctcggtgggcagtacacaggacattggctccaggggttgtgagagggcaggaaagaagggcaggcactcactaaggactggctaggacagactggaaggaatcttaaataacatattaaggattttaaactcccaagtggataagacaagtatttcaggctggattgtaagacgttgattattggtaaaggtttgagttaccttgactctgccgagtattgctgctgtgtggttcttatagaccttacagtcttgtcagttatattccactactgtcttagtacactgttgagaaggaaagtgattatagttgagataaattaaacttaaaagccactgttgtttcttattcctcagttattagaatgcaagatttctagggcattgccttgaagtgactgaggtgggatggatatgtagaacatatccattaaatttaaaaggtagaacaagtttgtttttttgtttgtgtgaaggggaccgattgaacctaggccctctcagacgttaaaaatacaccctaccactgagctgcaccccagactttagttatatacaccctaccactgagctgcaccccagacttcggcaaactggtggaactattattttaaaaataaaaatttagctagattgagcagtcagcaagttaagtgaaatagatgtgagctttgtcagacacagagacacgtccaccctggcatcgtctccattttattttgtcaacatgatctacagcagaactgcttggatggtgtcagtcaattgctgtttgtttgtttgtttggtttttcaagacagggtttctctgtgtagctttggagcctatcctggcactccctctggagaccaggctggcctccaactcacagagatccgcctgcctctgcctccccagtgctgggattaaaggtgtacaccaccatcgcccggccagttgctggtttttatgtagcagagacatacagaatattggcctacagaatgacagacatacacagccatactgtctgtcaattcataggtcattttcctgtacaacagttcacgatgagaactttcagtgtcttccatggttggatcctggtgacgtagcacttgagttttaagacatttatattcttaattgtttgttggaaaatagaatgaaggttatcggttttcttttttaattaaatgaggtcaagaacccagaaatttctgtctttcctttccgacactgtagcaggttggtggccatcaagagtaacagcacctccactggaagtcagcccacagtccacatggagttgctgttacatgtgatgaccccatgacactcgttttgttctgaaacatgtagttagtgtgtgtggttctgagtactaaacctggagctcagtgcgtgccaggcaagcactccgaaatatggagctccacccccagccctctgcctcctcctgatggatgtgtaggtgatgggtgggagtggtggcagtttggggacaagatgtagcctgtgccttgcagtcctgccttagcttcctgagagctgggacccagggtgagcgttaccatgcctgactctcctgcttttttgacaaaagtcttcgcgttacctctaaacatatttgttttgcaaaggaaaaccttggtttatcatgttataaataaacttaaagactggcagacttcaagctctggacttgacttgtgatgtgttaattcatttatagtctatgcttgcttctttttctcaagactagttctacttttggcattaatatcattgggcattttctgaatctgtaataaaatccctgtataatttaggtgaaatcaattcctggttaggaaaaacaaatttttttaagcctaaaatggataaaggataaaatttagaaacattggccacctagagaagacaagaagataatgatggagtttctcttatttcaggtgtgtgttgtcacctaacactgttgacttaggcaacttggagccaatgagtggaaacctgtagaccttatattcatgaagtaaagaaagcattctaactcacttcccgctgcctttccagatgggtataggacggaatagaaaaccagctcttgtctctgacgctgggttgtgtccttagtcacatgtagtaaacagacaggaacacttaacctcttacctcgcttctccatggacttccagcagggatcttgtcttgtccttttgcctctgaagagaagacaggcagagtgagatggcagcagtggctcctttacctggaagccctcagtgctgcctgcttcccagctaaatacggcccctgccactgagagcacagctcagcgattggctgctctgggagctgcttgcacttccggggttttccctgatggaaactgaagcaggaacatgtaatgtgtcagcaaaggtctttgagtcaagtataaagttttattatgtttgacttattgctctgtgaaatacagcattaaaatggaaacagattacatagcgataagtggtttcacccacttttatcaacagtaatttatactgatttttaggtcataagtcaactgtgtgttcaaggataggacactattaataaaataaggagaattcttgaatttgcaaggaaaaagtttagatcccaccccaaagcacataataatatcaccggggaattcttaacaaattcttttaagacatttgaaagcgtgatctcattataaatcatcatgatctcatgctctcattattcattataaaaaaaatccacttctaagtatttatcataaagaaataagactaattctgtacaaagatatgtatataagatgtccagcttagctgtttgtcaaggaatgcaatgacctacaaaagaagacaaggctagggatatagcccagtggtaaagcctagcactcatgaggccataagttcaaatcccagcgtcacacatattcacacagatgaagtttggatcacttatagaagagtgatcacaaagacttttagggtggtagccttgctcttcatggtttcgtaggtccccacttaatgcaaatctagtgaccagacctttccagcatgtggctgtgtctaggtgggttttgttgttttttggtaggaggtgaattctctaccattgagctgctttcctgccctggtttcctgagacatggactctgtagctcaactgtgcataagcccagtgacctctccagtttgcctcctgggtgttgagttgctggtccatgtgaggtgcagatggcatgagaaaatgtctgtttgtggcagcggtgctgtgcacttgaacttggatatgttcagatgggaacgctttttgttaacctacttttaaaagttaaatttgttttacagctcaatcaattaactgttttaactgacaaaattatatatgtttggtatatacaacatggcctcttagaaaacatagttatgttgtattaatatatacttgtttggtttcttttattctttaactctagggtttactttcttttgttttaaaaatataagtcatttgtttgtccagaatctcaggacagtcctgaatttagaacaggaggcttagcaaggtgtagtgagtgttcttcatgacaggttgtgaagccaggagcacaccctctctgggagcacaccccctctgggagagcctgccttttcaaccagcacagcacctttgggtgcattgcaaacagttttgtttcagcttcctaagaacctaggataaagagcaaaactgggctgtttacttgctatttaatttggcaagtttttggcaggaagtgtgtctgtctgtctgtatgtataggtgtgtgtatgtatgcatgcatgtgtgtacttgtggtcctaggccatgctcatggtaagccagtgtcctcactgatctccatacttaccttggctgttttgtttgcttgctatctggtcagtccttggagctcattttgaccttgagctcgatttctcctgtagcaacctcttaaggtgttgaggtgacaggtgcagccgaggtgacaggtgcagcccactgggccatgcttgaagttagatttttaaaacaatactgcacgccgttttcattgatcaagattacatttgtagttgtgccatttgtaaaaatattactaaagaaaatggaaaataaaactaagcaagcactgtttctcactggacatcagaccttgtaagtctaaaatatgggtttcatggtcttcaaatgaactgtgtataaaatgcacaagtgcttggcatttaggtggctgaggcaggaggattgtgagaccagcctgatctatatggtagcactgcagaaaagcaaagagatggggtgccctggacaaaactaaataaagcaagattgtgtttcttcttgtgttaaaacacggtcacatgtgcaagtgaattagcaccatttttataaggaaaggttacagttaaaggaactttatttaggtgtgtaaggggcttgaactgaagggtttatggttgacttaataagatacagatagcaggtttaacatccttctttgtttatagactcagcaaagtacttagtatatctaaataaacacttaaactacaattttaaagtattgttgaattatctgatatctaaagaaaagaaaaactgttaattgaagttgaatttgttatgaggtagatgtgaaatgcatcgtgtaaggcaacttttctttagtaagattttttttaaaataaagatcagaatcttttacagcttttcacagaaactgaagctcaggaaaacaccacgttttactcttgttattagccaacaaggcagatagagcatggtctttggactctgcttgctctgtcaatacactaatctcccgagactccctccttccaagctgccttcaacctgcattcacagcctcctctgtctgggcagtccgagccctttgccattgcttagcagctccagagaacagggtgtgagttcagccaggggcttgtgtgacagaggtgggacaaagaagtggtaacagcccgtgcctgataagacagcatactttcaaggcctggttccaactgttcagtcacttatttagactcaggatttatgagatgaagacacagagcagtcaactctcaagagctctatttacaggacttgagcgtgctaggaaagacagaacccatggcgttcatttgatggtactggtcctgcctgacttgttaagttagtatgaactgtgaacagtttcctttcacttctctattgcttttatgtttattgcaaacatatttaacagttttcattgctttcctaattggcagtctaatgggaacatgaaaagcacaaatgaccctcatctcctgactcttccttttttaagggaaaaatgcataattgggatgaacagcatacccactgcaattatgcatatatttgaatgtactttgctagtattctgtgttctttggagcattcagtttattgagatttttctactatcatgtgttcatactttcttaactgataaagtgttctgtgcaaactatataaaagactaatatataactaagtattattgtcttataactagttatttattgcatcaagttttatggtgtcatagggaaagcttatcttcactgttaaagtccatccaaagtgaacgcctgtcctggcaatctgtatttgtgccaattttaggtttttatattcatgttagatgtaaattcttagacattttggtagcattatgctttcagtctttcataaaaatcacctttattttcttttgtttttttgcaatagtctcactttgtagacctggctggccttgaactcacagaggtctgtctccctctgcttcctcagttctggaattacagccactatgggtgccactatgcttggcttctctctccccttttaagatgtgttttatgtgtgtgggtgttttgcctacatgtatatatgtgtaccacctgtgtgcccagtgcccacagaggccagaagagggcattgaatcccctaaaactggaagtacagtgatcatgaaatgccttgtggttcgaaactgagcttgggtcctctgcgagagcagtaaacacttttaacccctgagccatctcttcagttcccaccttaatctcctgtgagttgtctgaaatctcaggttaaagagcatgttagtttatattacctacttgattttgcttccttcacagtttgggcaaacagcgcattaacctgtgacttagcagatggagaatctgggcattgtgctgtgcacagctaataacatgctgatgcagatttggaacgcagtgcttcccgtccacactctgtccattcccagtaactgtgatggaccacagtcagttgcatcaatggagtgtggttgggggtggtggtgtttgaaattacagtgctgtgtgtctatttcaatctttatataaagacataggagccgaagtggtagatggtggttaggagcgcttgccactcctccacaggatcagggtgtgatctcagtgcccacgccaggtggatttccacagcccgtaactccagctcatgtggtatcagtgcctgctagcttctgagagtatctgcacaaatgaactcatgaatacataaataagaatcaatctttttttgttttgaatgagttggttaattttcttttttttttttttttgtttttttttttttgatttatttatttattatgtatatagtattctgcctgcatgtatgcttacatgtctgaagagggcaccagatctcattacggatggttgtgacccaccatgtggttgctgggaattgaactcaggacctctggaagaacagccagtgctcttaaccgccgagccatctcttcagcccagttttttcttttttatatatttgaattacaaacaagattgaattacaagaatcaatcttaaaccctaatataggcacatggtttaataattagcatgaaattaactattcaaatttgccccagcatcagcctgaattcttacatgcttgttaaatgtatgttaaaatgacaaacgttgctgtgggtgtttcactcaggatgtgccgttatttgtagtttacaaatgagaatattgaagtcagagaggagagcccagtgcctctcccagtgtcacttggtgagatagtaattatgtcacccctcactgtacctaaagctgggggtctatgctgctgccgcctgttatgtataaacaaagcagctccaagagaccctggtgtcatcgggaaggacgtgtcacagtgaaggccagcactggggtcaggacaggaggatggtgagccccaggccacctcagctataacgctgggcagtctcaaacaaggctgggttgtatctcagtgctggagcatgtggggccctgagcctgatccctagcattacacagcaataaagtatctgttccgctaggggaaatcctctgtcctctgttttgtcacccgttgtagcatctctagcgcctgggatttttttttttttttgattgattgatttatttattatgtgtacagtgttctgcctacatgtatacctcctgtaggccagagagggcaccagatctcattacagatggttgtgagccaccatgtggttgctgagaattgaactcaggacctctggaagagcagccagtgctcttaacctctgagccatctctccagcccgcacctgggatcttaaggcactgaacctgctcagttgtgtttgggcaaatcggttgcattgtttctcacatcttgtccatatgagcaagggagtcagactgtgagcctccctgtgggcttcctcgtatgccggatcatggactaagtcatgggcagagggggccttgacagtgtctgagtggggttttgtgtgccagcagttgtaggagtgcttctctgtgagcgagggagaacccggcatcttgtaaccagtgcagtaagactagactaagcccagtggaagctgacttggtgtcagaaagtgagggcagagggtcttgggtaggaactagacggactgaaatagggaggcaaggagacactggtcttcctgtatagggatgcggatgatcaagatgactttatttgtaccgagcaagcgattgaagattctactgaatcagagaccagtaagtgacaagtggttgccactcatcatgctaatccgttgctgatcccacctctttccccaacagccaaaccattgagcatatcactaaactggtggaggagcatggcagcgatgtttggtggaccctcccccctgagcggcttctcccggaggatgtcgtagctcaggtaaattgcccgtggtgaaaatgtgagtgactcttggaggtaaaagggattttaagtgactgtgttggaaaataggtgagtctgctttccagagctagaggcagaggcagatgcagttaagaagtgaacagttttacttgcagttgaagcatcgtttgcagcacagcagtggaatgaacttgtgcatttgtaacctcacggggccctcgtcgtcctgcctgtctttgggtgaggaagcagatggtaccacgagagaagtccctgctgttggagcagcagggctgtgtgagctctgacacagcacaccggtggtatctgtcttctgtcccatactgggagttaactgggagaagagagattgttgttacactcgtagcaacgtcgtcatgtggccattcactttccctgctgcgacgggggattcgttcaactgcgaagtgcattttaacatttattttaaaaatgtgaatttaatggttgcatttcactttcttaaaatggtgtgcgtgtgacctcagaggacaactctgaagagctctctccttcggcctttgcatgggttccagggatcactcggctccatggagcatttcctgtgacggtgtggcctctgtaggtcaagtgtcttctgctgtctctgtaggctggtggtcctgatgctttggaatacgtgccagggcaggatattttggacatctggtttgacagtggaacttcatggttttgtgttcttccaggtaattttctattatgatgttttattatttttctgtgtgtgtgtgtgtgtgtgtgtgtgtctgtatagcatgtaagtgatatgaatgtaagtgcccaaggaggtgagaggaccctgaatcccctggagctggagttgcaggcagttcttagctacccaatgtgggtgctgggaaatgaactctagtcctcagaaaaaaacagaggactaacactgactacccgctgagtcatccagctagctcctctttcaggtagtttctaaagttagattttgtttgtttgtttttgaaacagggtttctctatgtagctttgtagaccaggctggccttgaactcacagagatccgcttgcctctccctcccgagtgctgagattaacagtgtgcgccactacctcgccactacctcctggcagccagttaagttctgaaggctgacaagatgttcaggtagaggtgactgccacataaggccattaccctggcttggttcctggagcccacacaaagggaggagagcgctgtctctagagctatcccctgaggtcacacgcacaccatgcatgcacagtgagatacatgcaaggcaacaataatagcacaatttgaaaatacagaagtggtaattaggtctttgaccacaaacattgtgtgggttatgtttggtttttctttatttggggagtgttgtagtcagtgttatattgccatggaaaaagacaaaacactatgactaaggtaactcttaggaaagaaagcaaattgagctggcttacagtttcagaggttcggtccattgtcatcatggcaggaagcatggctttgggcaggcagatgctgcagcaatagctgggagttacatcctgacccacaggctgtgagaaaacccatgcctggcaaagtctacccccagtgactcacttcctccaagccacatcacttaactcttccaatcttatttcactccctggtgactaagcattcaaacagatgagcctgtgggggccattctcatccaaacactgcagtctgctgcagttcagatctgggaaggcctgggacatctttagtccaatgatttcccaacatactcattttttttccccccaaggtaaaattttgtttagaactatgctagttaacattagaatggaaacttttagccagcttggtgctctgtgcctgtaatcccagcacttgggaggtagaggcaggagatcatgaatttgagtacagcctaagctacagagaataccctagctctaaaaagtcgacaaaagtgggttattttggttttgggtttttttgttttttgttttaaattccccctcttcaccagcagtttcttctctggcctacatggcaaccccaaggcacccagtttggaaaatattatcataacgtgaccccatcatttctcatgagggatcaagttagaaccaggacacagaggtcacatagctaatggtgtcagagtgcacttgtggcctccgctttccagctccattctcccgccctctgtacaccttcctagcaccctagctctacagacaactcatactcccagttgggtaagtttttgactcattgcatgaagagaggggaggggcatagtcaagagtcagaggcggctgtatgtggatgtgttagaagaaatccctggaggatcccaaggagttagacatagaatgaagaaaacctgtcagcacagggagcttaagactgtgggcagagtttcctgccccaccagccagttccaaataagcactcagagacttgttattaattataaatgctcagccaacagctgaggcttgtcttcagccggctcttacaacttaagttaacccatttctattcatctgtgtgctgtccaggctcacttactcagcaatgaactgcctattggctcacaactctggagactccgcccttcttcccagtattctctctgcccccaaatcctgcctagctgccagccaatctgctttctattatcagtgagagcaatgtgtcctcacaatgtacagaaagattactctacagtaatggctcagcccctcatactccaccaagggccagctgtgaccacaggggctttctgctttctagagcaaggggctggggacagcagctcctctgtgcagctggacattaaagaattaccttcaggtttcacatggagtaagtgtgacccaaagcttcactgtggggagtgtgctgtagggcctagcaggcaatgtaaattcttcatctggacttttcaacttaggcaggtggaaagtcaaacatacataaattcatgtgtatccactcagatatgggctggctaactagatgttaatttaagtacatttttacatattaatttttggtattttttctaattatgtttccctggacacactgaaggccgtattgcacggttaggtgttttgttcctgtgtgtttgtagatcatgtaggtgagtggcactacttgtgtattttctgctggcacatttgtggtgagcgtagcctttaatggctgagccgtctctccagccctgctggcacattgggacagcctcctcagtctctggaccgagtgtgccatgtgcaaagtggtgacagacgacactcatgccctgctgtcctctggagcaaagctaccgactctcatcattgttcttaatgctggacatggttttggtgaccagagacagtaaaggcgagagtcatgctgggccttgggtggattaaactgcatgaactgtcattcacacctgcctgtcacgtgacttccatgcacactagacaagtactgtctgctacagctaacgccagcctccagcgggtggatgtctgatcacatgggcttgactgtggcagagcatggtcacagcagagcacggtcgttttggttaccccaaagctccaacacacacttggttttatttcttgttctaattaatgtcattttggtgttaatccttttcaggcactgagcagagggcagacttgtacctggaggggaaggaccaacttgggggctggttccagtcttccttactaacaagggtggccacaaagacaaaagcacctttcaagtaagtgctcgctctgtgcaaagtgagctttgatgatctgctcagtgcctgccaggtgtgccacacaggttggggccagatatgcacaggccagccattggcaagctgtggcactgctcttcctggctctggatcagggcggtccctgagtcagtgttgtctagagaaggtgcaataaggccgaaggacacagggttagtctgttgtgttaggtacagtttgtaagaaagcaccacagtttcctcttgtatagtcatggtggcacacgctgtaatccagtcactctggaggtggagatgagaggatcttgatacgatggtcagcttgggctgtatgtagaccctgtcccccaaagaacaacagaaagcaaacagaatcaacacaagaagaaaagaaggagagagacacagcagtgtgcggcgtctgtcactgtggagcaggttgcacctcctggaagataagatagctgggcatgggggctggagagacggctcagaggttaagagcgccgactgctcttccagaggtcctgagttcaattcccagcaaccacatggtggctcacaaccatccgttatgagatctgctgccctcttctggtgtgcagatatacatggaagcagaatgttgtatacataataaataaaatcttaaaaaaaaaaacttatataaaaaaaaaaaagatagctgggcaacctgtagagcagggtccccagtggtggagagatggccaagtgtgtagggaaggacagtgccgcctgccgagggcaccctgagctcactcttgctgtgggacctgctgcgactaagggactgaaccccgctggggtgagttcggacagttgctcatcatgtgcccatggagtgaagcaggcgtcactgggggccagtgttaaacggtagcctgagggtttttcactcagggtgaatgttaaacggtagcctgagggtttttcactcagggtgagtgttaaacggtagcctgagggtttgctctgccacacttgtcgcccaccctcagacagtcagctcactgcccatgtctgtgtctcttaaaatcagttgtcgacttgaagttagctttaaggaggtggtctccctgctctttgttcatcggaggctgggccatgctgtgatacacagaaaatagaacacttattttactgcgtttaagtggaggacaccctgcttcctggccctgatacaagaatgctgagaaacgaccttcacccatagtctgtcaagagagtctaaggattaaatgctctctcaccctgaagtcactcgtctttcttaggacagtgatggttcatggattcacacttggagagaaaggagaaaagatgtccaaatccctcgggaatgtcattaatcctgacactatcatcaatggaggaaaagtaggtgtctgactgaaactcattttcattttgttgtcaggctattagattagcaagccaagtcttcagcagttacctcggtgtgaacaaacacaagactgtctctggtaggctcaggctgtgctagggatggtggctagctcctcgggaggcagagacatgagggttccaggagcccaggaattcagggaaaatctgggcccagaatggccgtcagatctggggaaagaagtccatggtgtgttgccttgttcctttctcctcttgtggtcactgggtttcgagggggataaagaagggtaaacagctctgcactcccacactgcagctgctgtgtgcctgacccagaagtcctgggcgctggaacaagcctgggctgtcctgtctgttccttggacaggactgcctcactcgccttttcagatacagtctgctttctggtggctttgcctgtgtttttaggtaccctgctcagcctgcatttacaatttacagtttctgagggggaactctagctgaagcctttgtttctctaattaaatatattatttcacaagctcctcttgaagatcaaaattacaaaggaaaaaaaaatctcagaagtgcttatcagttagcctagtcactgcacactgtggaaaggctgtagtattcagattgccccaagtgccctgcactgtatcggagcccctctactaataggggaagctggatgcggaaggaggctcttacatgttgtttttcaatgaaaaggatccaagcaaagagcctccctatggagctgacgccctgcgctggtggatagctgaatccaacgtcttcactgaagtagccattggcccctccgcactcagtgctgctagagatgacatcagcaaggtcagacccacttgttgaaagtttgagacatacatgcaaacaaactgcatgtgaccgtttttaaatacccgtgttaatttgtttaaaaacagtcacactaaggaagggtacatgtctttaaatctgattaacgtacagactgtatagcatataaccatttgtgactaaagatgagcaaaccaggctagggaaaggtggtttatcctgaagagagttaatgaaaaactcatccaggcttgtttctttataaaatcgggtgttagaatgagagttaagttgtgcttctgcaatcttatgtaggaataatagaatttaataatcttattaagaaaataactggacttgaaccacgtggtggtgaccatacctttaatcccagcacttgagaggcacaagcagggggatctctgtgagttctaggccagccaggtctacagataggatagccagtgctacacagagaaacccggtcttaaaaaaagaaaataacagaagttgggaaaaaattaacagttgtaaagtaactattgaattgaaaattccatgacttgttaactgtgtactttctcttactatgactagcttagaaacacactccgctttctcttgggaaatgtggctggttttaacccagagacagattcggttcctgtcaaagatatgtacgtcatagaccagtatatgctgcacttaattcaggatttctcgacaaaggtcagtatacaacagcaggctttgtcaaatagcatcagctttcccggaactttagtgggtggaccttgctagaaatcatacctagtgctccccagaaagtacactgctctgcttcacacagttcaaagtgactgtgggttgaagctcttcatatctttgctgaattatcgctttttatttttatttatttttttacatttaattagtgtgtgtgcaccggaattcatgagtgcacagattccttccactgtgttggtcccagagatccaactttggctgtcagcctcgacagcccgtttacctgctgagccatctcatcgtcccttccctagactctcagggcttccttacagggaatctgactctgtcataagtcacctgatctcagtggctgtgcctagtgcaagcctccatggcccagtgactcttgtgttttgtgcctgaacgcccagttccacgaggatggaccacatccggttctgctgtcagctcggtgtcttctgtcctccttcctttctttttttggtttttcaagacagggtttctctgtgtggccctggctgtcctggaactcactctgcagaccaggctgacctcgaactcgcagatccacctgcctctgcctcccaagttctgggattaaaggcgtgcaccaccatcacctggttcttctgccctgttctgccacagctgcagttgcttaagaaaacacttcgctccaaggttgattttgaacagggaaccccttcagtggctgtctcagttcgggctctcaaatgcaattgtgcattcataattggagccttcagtggctggggttgtgatttcaggatgcctttctcactgtcccagtaaagaacacggggtttccctgtttggctccaatctttacagtgatagccgctgctctcactgcatctgctggacgtgcgccttgactctcacttcagggcctttcctcaccaactgcacattttttcagaccttcgtgccctgtcgtagaggcaacagactagcgtgggtgctttatatattctcttcagggttcctccccacacaactgactgcattatttttaaatttagcctcatccaagttaccaggacagggcctgggaagatggcttagcagttaagagctctggctgcttttccacaggacttgggtttgactctcagtacccatgtggtagctcaaaactatttgtaactccagttgcaggggaccccgctccctcttctagcttcttcaggcaccaggtacacaggtggtgaatagatagatatacacgcaggcaaaacaccagaatataaaataaaataattttagaaagttaccaagacaagggcaaagtgcggctagattctttgccagaatgtaacatggatgacctctggccagtttccagcagagtccccttctgaaatctgagttgggtctccattgccctcatttttctagccattcttgccttccagattcctaccaaccttcctgaggcccccttacctcctccacagccccccaaaccctccaaaggcatctgaagcagagcgtatttattacagcccccctccacctgccagagctccatattacttttttttcctgacaatccccggagaaaagcaactgaagggtttattttgcattgatttatttggcaaggggtgtgtgtgtgtgtgtgtgtgtgtgtgtgtttctgtctgtctgtctgtctgtctgtctctgtctatctttctcagtgctcacatggctgtcctctatgaacagttgtggaagtcagttctcttcattctccttgtgagtcccaggggttgggttcaggttgtggggcctggtggcaagtgcctttatctgctgagctgcctggaggcgggaagtttgactcacagtttaagaagagacaaagtgtcatggctgggaagaggctgtgacattgtgtctccagtcaggaagaagagagagtactggtgctccaatcacttcttgtccctttgcactcattcccgggcccctgcccaagatcttaccattcatgttcagggctgtcttccctcttcagttaaatgtctctggaaacactgtcatggacacatccagatgtcatctgcttggtgattctaaatcctgtccagttgacagtcaaggtgaacctcacatatatgagacatagtctgttttcccaaaactggacatgtcctgctcagtgtaccctatgtcagaagcatgcatgcagatttcactgaaaaaaatgaatgcgggcataagtgagggaacatgagtccctggtatcttcccttctttgctgtcctaaaaatgatatggttgggccggtgagctgagttagctgacaaaggcattgatcccaaagcctgatgacttgggtttgatcctcagaacccatggtggagagaaccgactcccagaagaacccctccccccatctgagacggagtcatgctgtgtagcacctatacatacatgaacatgcatacttaacacaaagcaagcaattgaacacaaacccttctttccttggtatccgtttgctgtcatttccagagtagagtcatgattattgaagtattcatgtctttagtgttgtaatttaaaaaagcagtgtgcaagagaaagacaccatgggacagcttgtgtggaggggtttgtattgggggaagtgaatgggaaaagtgggggggagagtagagactggcttctggggaccagagctgcaggagagagaggggaggtgggaagggcccttttaaaagggaacatagtgagtgtgcacattggtgctcttagtggctgcagctgaaggcaaagcctgtcagaacaccaacgacaggccagtgcagacgcctgaatactaactagaatgacattctctggcattcttgtgttcttgcctgtcttgggtgtatgtctgtgtcgtatgcatgcatatgtatgtacttgagtcagtgtgtgtgcacaggtgcacactggcttgtgtgtggggggggcacgagactgatagtgctctttcatctcattctttgaggcaggtctcacaggaaatgggccggtaagatggctcggcaggtaagggtgcttgcggccaagccaggtgacctgagtttaaccctgggactggcacagtgggagagaaccaactgtaaattgttctctgacctccacatgtgatctgtggctcacacacacatgttccacccctaaataaatgtaatagcaagtttgtaaaaataacaaaaaaagtcatcccatgctggttttgcagcaagcatgcatcaagggtcccagctccacggtttagctggaaccacgggcatttcgggagggcaccagggccacacagcacttaagtctggttctcatgcctgtcctgtccagcaagcgtgggggctgaggcagctcctctgagaggctagtgaaaggggcttgcttcacccgtgacaatgcttctgtttccgctgctcatcccagctcccaaatgcatcctgtctttgttccctaggttactgactcatacaagcagtatgattttggtaaagttatcaggctgttaaaagctttctataccagagaactctccagcttctacttcagcatagtcaaggacaggtaagtgtgactaagcacacagccctaagcagcatcaaggatgtcatggtgggcagctgggcaataatgacccctgggatctggggtcaagcctcacttgggccctgccactcagtagcttcatgttggggcaacttttgagtgtaatctcagtgtgtctgaaaaatgaggagcactcaagaagcggaggcaggacgatctctgagttcaagaccagcctagactacaaagagttccacaccaggccagccagggctacacaaagagatcctgtatcaaaacctacagtgaatcacagctgctggtagatgaacactgtgctgtccttgagggcagacccaggactagacaggcagttctgtaatgacgctgtcgtttacggtgctcccttgagcaggtgagggagcgggcttggtgacaagtctggcatgagctgtcaatcccaacctgtcacacggcaggccctcagcagctttagcatagggtatacaactcacattcttttactggtaaccctaatgggatgggagtcatttaaatgctgccagttgctgtattggttgtgtgcaaagacggtgttgtagattgttgtccaccttaaagccagagttggacaaccatgaggaaacaggtgcatcttgagagagtaaaatggaatagaagttgtccggagccagcatggagtagatgtagcagcagtactgggcgtgcctagccggggcatcgtgtcagctgctgagcaagctcctcttccaggctctactgcgaaagtgagaaggatcccaaacggcgctcctgtcagaccgcattggcagaaattttggatgtgctggtgcgttcttttgctccaattcttcctcacttggcagaagaggtattccagcacatcccatatgtcaaaggtaaggacagccgttctctgcatgggaagggtcgggcaggggtaacggctttatacacgtcaaacatacttgcagtgccactgccatagtgttttggtcatttagtctgctctgtgccttcttaaggagttggctgtctgtgccttcagagatgtattaagcacttgacaatattgggaaattacttttgcctacatgtgtttatagtgtttcaaaatatatttatagcttttggaaggtgggatatgagacagggtttctctgtggctttggaggctgtcctggaactagctcttgtagaccaggatagccttgaactcatagcctgcgtctgactcctgagtgcagggattgaaggtgtgagccacccctgcccggctgtattttaagctgtattcaagcaaaatatggtgctttgtagtgattacttttacttttttttctctgcttttattttcatagaaaactagaacttaagggggtggggtagatgatcactctaacctcaccatcataaggaacaactgttcagactgggcttccttttgagtcttgtatgtttgtgttgacaatgtgaacccttcgcttggggaccctgtgaacagcacacctgttgcctgaatgtcacatcctatgtcacaaccttgtctctcgtgagtgataggtctcccttggttaaagcttatatgctgtctagactgtaactcggttcacttttcaggttttttttgttgttgttgttgttttttagaacccaagagtgttttccgcactggctggattaatacaagttctatctggaagaagccaggcctggaggaggcagtggagagcacatgtgccatgcgagattcctttcttggcagcatccctggcaaaaatgccgccgagtacgaggttaccattgtgatcgagccggggctgctgtttgagatcatggaggtatgcggaatggatggtgttgctcggaatccctaccttgcagaatggtgggagctttgaggctttacctgaaatctcttcttaatctcaagtgtttaagactttgtatttagaaaccaggatttcaatcttgcaacactgaacttgtcactgattgttccctgctctgaatttgtgacccatgcaggggtctatttaggtcagtgccagacacttggcagtagtgtcagattacataaaaaccaggagttttacactaaaggcctgggtctgtaaaaatttattcatctggttcatattccaaatgagttcttgacgcgcagtggtggcgcatgcctttaatcccagcactgcctgtcacgacagtttcaggggatccaacaccctcttctggccctaggcctgcatgtaatatatatgtatatatatgtgtatatatgtatatatatgatgtgtgtatatgtatatatgtatatatgtatacacacacacacacacacacacacacacacacacacacacacacacacagcaaaaagtcaggcacataaaataccttaagtctttaaaaataaaaggaaccatcttattttggttgttaattcaattcaaacatttcaagatttgcgacttgaagtcactagaacataggacattgttggcagtggtaagagtagacaatggccatgcacaccaaattaatctgagtctcatgttctttcatagtaaaggaatatttatattacgatcaaaattagaaaggaaaaaaatctcaaaagtgcttatcaaatagcctagtcactgtacacagtggaaaggccatagtattcagattggtctacaaattgagttccaggacaaaagaaaccttgtctccataaacaaacaaagttggcagaattttggcttgacagacaagggtaacttaacttcttacttattgcacttacttatctataagtgtaataaacaccatatagatcggggtttgaggggaaccacagttttcaaagtaaaagtgtatactccagtaaagcctaaaattgatggtcaagtttcaattgaacagtaactctcacgtgcattccagatgctgcaagctgaggagatttccagcacgtctcagctgaatgagctaatgatggcctcccagacaacactgctgactcaggagccacgggaaagagctgaagatggaatcgagctcacagggtcgttcctcatcaacctggagggtgagagcagtgagtggggcctgcagagctgaggtccccagctttccatgggactgggttactagtagtaaggtagtctgtgacctgctctctgatcaagaccaagcggggcagggagttcctcctcacccccgagtgactgtcaccgggagtcttcccctcgcattctgtcctctcatatgtcgtgcctactactacccagacccacccacccttcctatacagactctagaacttccttgtatgaatacccacaactccattcttacaaagggttcagtaacatttgcctggtggttttttttttttttggtttttcaagacggggtttctctgtgtagctttggagcctatcctggcactcgctctggagaccaggctggtcttaaactcacagtgatccgcctgcctctgcctcccgagtgctgggattaaaggcgtgcaccaacgcccggctcagtttctggcgtatttatcacaggactttgtacactgtctacagagctcttttacctgactcctcttcattaaccagaatggtggagaagagttggttccatttgtgtaacttaagtctttagtggcattaccagagtcgctataacttcacttaaaatcctgagtcaagagctgggcatggcagcatacacctttagttccagcactgaggaggcctcactctgtgtatctgctcatcaattatcaagttgtttgatcccgtgctgttgacagttcatgttaaggggcagaacctgggccgggttagaaagtgggaagggagtaaagccttgggagggagtgctcgcggaatcagtgcaagcttaatgactgtggaggtgcttctgtgtattctttttaaggtggtgacattcgtgaggagtcttcctataaagtcattgtcgtaccagctgccagagaaaagtgccctcgatgttggaagcacactgccgaaactgcagatactctctgtcctcggtgtgcagaagtcattggtgcaaaatagcattctgatgttaaccactctgagcaagagcctcctcagggctacctgagggtgaattattagaaccctagaaagaaacccaagggttaggtaaggagtggaagagtaaatggtaaaagagaagatagggataaaaatcagcatattaaaaggagtatttcctgtaactaacatacacacacactcatgatggacttctgcagagtcaggcactgaatatggttactttcagtgtggccaaagagaatattttgtattttattgaaacttttgactccgtatttaagttctatgatgtctgaaaataaaggcattctgggaaactcccaactgattgtggtgtagaagttgtggataatgaagagtatgtgattttgcaagggaattgaagagttgtgtgcccacacaggtgaagggagtcaaaacatcgtttgcaaggcagctgagtttagaatgtaccacaaagaatatcaacaaacttattattcaagaggggagaaatcgctttgtcttacatgtatgaatgtcgaaataacatgaaatctgaaaatttatttcactaatatacataagttcacaataatgaacagacatggaaaataacggtatatacagaattcactgcttaacattacattgacagtagcattgacagattgcaagcaatccaatactggattgatctctaaggatggctaatctactaagcagaaaaagctgcctagcaaacccatccctgagaggtgagagggctttcactgttgctatagtgcactgttaatacgtgtttcttcacgaaatggacaatagcaacttctaagtgaatgctataatcaatgtaagcttattgttactaagtcttagttttccatgactttaaatcacaagtaatcctattttaaaaagctatttaaacacagcaggcttcacattgaccttagatgaccttttttaacgaggtgaagctcttttctgtttttttgctgaagtgggaagcctggtgctatgtcatgctgtcgctgcatttagccgggcccctccacttctacttctaagcacagcctgggatagagacgctcagactattgaatactttccttaaggaggtaaaaatatctgaggaagagatgggggctatctagagcaacactactggtcaagggcgtatgctgtgcccttgttgcagggagaccagccctacgtgagagccaaactcctttgtttgtggcactttgttgtgagagaattgatatataaatgttcatttttcttcatcagatttattttaaaagcccttagtaaagtagtacaatattttactccttttgttaaactcagaatttagtttgtatattacatttttggatgacaaatctaactttgagatttaacaatttgtgttgtggttctttgtgacataccagagtaaatttagccagttttattttcaaaaaatacaagccatgcccatctcaaaacaagtaatggaattagagtaaaaagtccattgtcatcattagctgtgcctacttcttccagagcccagcaggcattgggagaatggacctcataggaccatgtagagggtggtacttatgtcactcaagctgtgcttacaaagatcgcagcacatggccagctgctcctcacagtcacctgagcaacacttgaaacatttctctttgaaggcatgaaatctgatagttaacagcattaggtttagtgagtcacaatcttccttagatttaactttttattggaagagaattcacatatgctcgtgctcgctcaggttcagactttgtgagagtccttcagggacccccagtgaatggtggagttgctgtcttccctctattagaatgattgctgggaacaactgtgattgtggcagacccaatccctgcactgtacggctgccgtccagagatagctaaccagcagcgagtacttggtggctgcagggccaaagcactgtggccagactgggggccaatgggtttcattcactttgctcagcacttggactgccctaggcactacgggctgcagaactggttgcagtttgttctctccacccagctgtgaggtaggtttgctgaggctgtcacagcacaaagtgtgttctctgtcctgctcttaggacaggcaacatgaccacatcccagaaacagacattttgaacacttggaagataaataaagttggactttaaatattttagaatctttgctttgttcttttttttttacataagtattacaagataatacattttttacaattacctgatgtggatacaattttggaacttggcaaaataaagaataaatctcacttcacattataattgattttgctgcattcttcacatctctgattcccaattctggcgagtccagcaggcccggggtccttctccagatcccttctggtgagagtaaagccatttatcctctgatggcagcagcagcacccagagctccctgccaggtggcatcctgttgctgggccaagtataaggacatctctgaatgttgtaaagggatgtgggctgtatctccagcgtgctgatggaagctgtatgaacacacttaatccccacaggagccactggggtaggaactagaatactacaataaggaagaaatctgcaaagtataaccagttacaacaccaaagtttaacaataaagctgcttgtctgaatggaaaaaataacagtaaagcatctattaattatagcacagttaatgtattttatctttagtctcaactgaggaagtggaatttaaccaggattgcactttttaaaagtaatatatttatttattatacaaaaaaaaaaaaaaaccctccaaaaagttctaggtcttactgtgtaaaatgacatgcagtgagattttagacactgtcatagagtagccatggcttccacagcttcgatgaggtgtaaagcgaggctgtactgcccatgcctctctggcaggagctccatcactttatgtaccagtttagctgttgctgcaatgggcacgtcagtgttctgaaggtcctgggggttctgcggatgggacacaaaagtcctttagtttcatacagtcaaacatcaatggctcctgccttaagctttattagggaagctctcccagtaagaacattctctgggatgaagcaaatttcttgctgtgaactcccttctgcctatgctctctggcacttaccattgccttcagccaggtgcacagtgtgggtgggagtctggccagcagctccatgccttcttttgtctgagtgtggaaaagtgcatgagctagcctttgccctgtcaacacaagcagctgagacgccagaacttctttgtcgtgaacttgcagaatggcctgaggatgaacatggagaaataatacagcaagagctactcaacctgtcccctgaggatgtcagtgaagagaccctgcttcagctctcaacatggccatgtgcgtggacaaaggaaaactgaaatccaacctagaatttaaacccaaatctctgctcaccagctattttgtttgttacctaagtttttaactaggtatgacagacaatatgccttattttccagtgtcagggatgatgttagaccctgcaatcctccggtggctgctgagtacactaacctcaggcttggagagcagccaacctcttgtcactccttgctgggagtggacgcctacccacccattactcactgctgatgaggtgtggcagccacactggctttctagccttggaccttgccatgctggcccccacctcgggacctttgtactctctgttcctccatctgaggcactgttccctcagcgtgagtggccagttgcttcctatccttgatgtcagttcagctatcactttctcccacgcactgaggccctgcttattctacagctctgttcactcgtctcttggtacagagttgtccatgcttttctgctcctccaattccacattgagctttcctgttttactgtcctgccctatatgaacctggcaccaggcacaaccctggctagctttcttcttttgctgtccaagactgggtcttgtgcaacccagactgctcaatgtagatgaggatgacaccctgctgcctctacatcccaaacacagacaccacgatatgctactcaacatccgctttctgcttcctccagctgtgtgtttcccagcgtgagccctaagacggacatcacaggtcatccttacctcctctcctaagaggtcagccccatagttgtacagctctcccacataatgccttcgaatgacatcttcgctcacttgaaggtgatgggctaaatccacagccagagctggccagttgtggtctctccggggagtgggtactgccgcttctgtgggatctttgtccttggtgacagaatgctgagcctggacggctgcactgacaactttcattaagaacttgaagacaggaaggcatagcactgccttgtcagtacgtttcatttaaagtaacccagtacctgctgtacagagctggtagcctgagttcaatcccaatgctgatgggaggtgggagaactgactgcacagagtggtctgtcctccccatactcagtgccacggactgtacaagcaccccccccacacacacacacaacaactcagtgccacggactgtacaagcacccccacacacacacacaacaataactcagtgccacggactgtacacacccctttacacaacaatagaataaagtgcctcaagtcaactttttgtcaacaagagagactccactaaaattatttttaaatttttaatttggttttttgagacagggtttgtgtgtgtccttggctgtcctggaactcaatttgtagcccaggctggcctcaaactcgcagagatccacctgcctctgcctccccagtgttgggatgagaggtgtgcaccacctccacctggccttccttttcatttttaagatctgtgtatgtacatgcatgcatatacgtgtgcatgtgtgggcacacgccacagcatccatgtggaagagtctgttctctctgccacgagggtcccggagatccagctaaggtcacgaagtacctgctgggccatcccactggctctaaagttgtcccgcccgacaccaatgaaggaacatgcactagggaaagtgctcttgggaataactttgaggacgtggccatctttttaaaagacagctatatttctgcttcggtatttccacctaagaaacaagagcaaaatatagtagctagcttacctgttgtcttatagaaataaaatttggatccatttcaccactaggtaataactgaattgaagttaagtctttgaaaaatgcattctttccctaaagagaatgattgaaaaataagaacaaaaacacttggtgagtatggagcataagggaaagattcttaaaactaaatcactttactacgagtcattcttgattgaacagaaagattagcattctgctcatcatctaccttggtagccattgccagtatgtgagcagcggcattaaagacggcctccacttagctactattcaagcccaggcggttcctcctcccctggactgtgggctgctggctgccagcaaatatcattaggccggtgacagcaagtcatgttccacactgggttccagagaactgtggcttctgccttggtatttttgttcacccacaagagggcccagtggtccagtgagccaccttacagacatagccaagtgcagtaatcatacttcccaatctatctgagtctttagctgaaacctccatgaagcaacccccaccacagtcccacaagaacctttatgccaaaggcagctaggtgaggacgtcagattcctgacctctaaggtctgagagaataaaccaggtgtgatgacacatgtctgtaatcactggggaggtgggggggggcgggtctcgagttcaaggctacataagtgacactgcaaactaccaaggtctgtggttctagctcaatgatagagtaattgctagcaagtgcaggctaaaatctaaagtagtaagtgttggttgtttgcaatcatcaagtttttggggataatttttgttaagcagtagtagctaactgaaccaccagcatttatctgaatccttaaaaatacttattgcttaaggtttaagagaagagctgaggttagagtcatacagaacaggcaggcttggcagatggctcagaacacttgctgaccaagcatgagtacttgaatggaaaccctctgcacatacacagcaagctggaatggctgtgtgtgcctgcagcctcacactggagagtggtgggtggtgtgtgcataagtcagcttactggccagccagcctagaataagcatggagcttctggctctgagattccctgtctcaggttataaggtaaaaagctacaccaaggaggacacatcctcctctggcctccaacccccaacacaaaagtcaatcctcaccaggaagtggagtgcagagctgcgaacacccaggcctgccactcaacagctccagctgtgaaccagccatcccagaaagcctctcaaaagtgtgtacacagtgaatgtctatgattctaagttccagagagtgcttacaggttaaactacacacgcactggcttcggacagtctttgcccaggatgcaggtagtcctgactagcaaaggtccacatgcagtgcccacttccaaatgtttcattttgaaaaatttctgatcagattccccccccccacaccctgccatttttctttcaaaagttagctgctggagcagcggcagtctttactttttcctttgtgttctctgcaggctagatgtagtctctggcactatgctgcaccctgccgtaaacaactgtaatcaaagcgttaaatgctgttgattaaaaatctctctctggttaggtagagatgggacccaggacatcaggcataccaggcaagtgttctaccactaaggtgtatctccagccccaaagtctctctcttaaaatatgcactactgctatgtagactatcaaacttaacatggctaagatcattctaaacaggctttcatttgctgtaacccctttggcctctttcagcgctgtattcagttctgtgaggtggattcttgtagagcctttagaatttactatcctccagtccacacccttcccagcccgacgggacctttctcacaccatgtatcgttagcacactgcagacatgcttttccttgaacatcttgattacaaatgcatcaaccaagctcctgctctgtgataggcaaggtacacagacatgggcaagcaaagagatgtgataagtttaggggacctagacaagcactgtgaagacagtacttaaatgatcatctaaaaacaaaaaactggacaccggccacaggaaatagctgcctgacagcaggaaagactgtgggaagtccctcctggttccacagtttcatgtggcacaacttccccagagcaggaagaacagctcatgacccccagggctgtgagtgtgagagaaggaactgaataccccaggcccttgcatgccctctttagaggtggtgtttctctagggagacactttctctgcttctacagggtcaggcacctgagggacagccggtcttgagaaaagcctgatattacactctagcaaaggacagagaagggactcatttttctaatgagctgaagctgtgttctccaacccagtcacatctgagtggtaaagctgaagttttatttcctgtcggaacctgtatctcagaactcactagacagcctaacgacacagagcctttctgtggaccaccaagttcagagttgactttgcaaggagctacaaaatgtgagagacagaaccaatctgcttgggtagatcctcagggttgggccttgagagcgatgcaggcaggacagttgggaaggggtctgatttgctggtcgagggagggtggggaatgaggtaggagttagcgatacagtaatgcacagcagtatccaggtcgtttgttttgattcttgagccaggatctcctatagctcaggatggccaggaattggctatgtagcccatgctggtcatgaacacaccaacttacaatttctgctttccgagggctggatgacaggcgcatgccaccatgcctcagttctgctttcagtaagaacaaggaagtagactgggctgaggcagggctcacctccaggtttctagtgtgcactagtgcacaaagggaggcattaatgttaattactcaagccagggaactcaagggaaagcaaactgaagtcagggcaggatggggtgagagtctccagatgtgttctagatacagatttcctaggacattcaacagaagcacactcatcaaccttatgagtaagtctgggggtatctagggagaatatgcagaatgagaagggccatcagcagaggataaaaccccacaggccatcacaggacattatgactaaattagaagaatggaactgggtagggggtgaggacctaggactccagcggatcatcacccacaagccactggagaactggacacataccgttccataagaactccgagtacctgttagccaacagctctgaaaccctctggggactcaccttgctgtcaaaaagggcaagtggcttcacgctcctgagagagaagcgcatggctgcatacaggatggagcacagcaccgagtggtgctccaccagggggtagtggataggcttctgctcaagagccagctccactatggagatggggccttccacggacagccaggcatcctcagtgtccaggactggcatctgcatctcatccctgctaatgtcagcctggcgggttgggaatggaaggaaggccgtgtcaaggattggagaacaagaactgcaatctgcaacaccctagagtgaaagctttgtagtctgtattccccatgtataactcagaaactaggggggggggggtaaagagacagagagacacagagagagaccaaaacctacaaatgaatatggtaaataagccaaccatacatttcttaagctcaatgattttcagagtatttaatatctgaagagacactctgatgagaatgttggggagaagcatgctgtgtgtatgtgtggagtgtcacttcacagccctggctggccttcagtctcacagtctttctatcctagcctcccaagagaggatcccaggcatgctcccctgtgcccgaataacgtattacctccagtgaagtctgaagaagatccaggcaggaccccaggaaggatgtcatcgctgtgtcactcatccccacatcctgttctcagaaaggaacattatgacccctgcatcaaaacctctggactatcggaaaaacaagagacttagcatgtccacttgcctgactttctacactgaacacaaactgaagtcatcaaatagttaagttcctgccagtaggtttggtagtatcaatcaacttgatattagcctttagtgtgatactaatgatattactattattactatcaatcttaacacctggggtgagggtgtggctcagtggttgggcatatgtaagactctggattcaatctctagcaccagagggcaagaggagacagtaaaatacagtgttctttgtgcacagtaaagacagatccttcaacttgctaaagtatttgctagccaactaaacacagaatatggtaagatacatatatgaggttaaactagggaagttctaaggaaacaacctgagcagatggtttcatggcaacttgaaggcactgaactgaattctctgaataaaactagaattccccatttgacaaccaaataccagattcacattttgggcaagaaatagtccccactgacccctcttagacctgtgtgaggagcttctgtataatctttttaaaactaacaatcaatcaattattcacgcctcaaagtacataattcagagtatgtgtgtgtgctcgtactagcgtgtacacacctaactcgagtcatgcaaccatccttacagtgatctgggggaataagggctcttttttggggggaggggtttctgggggggggctctctgtgacttggaggctgtcctggaactagctcttgtagaccaggctggtctcaaactcacagagttccgcctacctctgcctcctgagtgctgggattaagggtgtgcgccaccaatgcccagccggggaataaggttagatttatgtgtctcaacacttcttgagatgtttaagaacatgtcacagtgtggaggaaaatatttaagaagaacatgtcacagtgtggaaggaaatggagcactactgatagcagcctagtgtccatggctcagaatctcaactgaggtcagtggttattcagtctgggtagaatatgcctgctgcaggtgaggctggacatctctactataagatggcaattcgctgcttccagtccagagtccaaagccaagcgaatcttaagacttacacattttagatgccaatctagacagggaaattgagtgaccacagatgataactatttccttaatgcagtactctctttctgttttttgttatctccagatagatcatcttaacagggaaaatcaaagttcactcatacagtaaggtgctacatagagtgtaggcttaacaatgagagtcactcacccttcggcataacctatcttttggagattttccaacctgaaaccgtcagaaaataaaacatttaacaatttaaattaaaatgtattagaatgatacagaaaataaggagcaagcagaattatagctataaatatacatgctagtaattaactattggcaggctaccaacaataagagcaacatttttttgtggtagaactcaaaaaaatcacaaaaaaatattacacagagctcatgagtgttcttttcaaaaataaatccttgggttagagagatggttcagcagttaagagcatttgttgctcttacagaggcctaggttcaattccctgcaaccacatagcatttcacaaacatctgtaaaaccagttataggggcttcaacaggcatgtacatggtacatattcatacatgtaagcaaaacattcatacccataaaggaaaataaataaacctaataaaaaattccttcctcccctaattgtgtaattttgaaccactaagtaaaagttctctctaggcatgacagagtggtacatgggtgaaatcccagcccttgaaagcaaaggcaagaagatcttgaatttgaaagtttaaggccagccagtgagacactgttataaagacagaaagggacaggggaggctgaaagatgacaagccagagaagagaggaagggaggcaagcaatggaagcttggtaaaaatccagctctcagtttgtaaacagttaagtaactgtgttgtctgaaaatccctgtaaacaacatataagagttttctttgctggtaaagagagagtttcaaatggtgacaaaagaaaattctgaaacagcaatgaatagccatgttcacaatggctaggaaatggaaacaacctaaatgtcctgcaaccaactaataagataattcaaaatcggtccatatacactatggaatgctattcagctgtaaagaaacgccaagtcatgaacttcacaggtaaatggatagaactagaaaagatagtgagtcacgctaacccacaaacagagagacaaatgtggtgtcttcagggtgtgagtccatacccttgagcacctgcagagatcagaaaaaaatacaaatggaccacgggttggtgggaggcagagatgcgatagagatgacacatggaaaacacagtggctccaattctggagcagggaaaagagataaatcaagaagaaagagggaggagggtgtctgaaaaagtcataaggagtcatactgtccgctatcttcctaaaatacctataacacacataaatatatacatacacatgtgtgtatgcacatacgatatatatgtatgcatgtatagtatgtatgtgtttatgcatatacaatatataatatatatagcacataatataggcatatatatatgtatgtatatatatatatatatatatatatatatatatatttgtttgtttttcgagaaaggatttctctgtgttgctttagaggttgtcctggcactcgctctgtagaccaggctggcctcgaacttacagagatccacctgcctctgcctcccgagtgctgggattaaaggtgtgtaccaccaacacctggctaatataggtattttttaatgaaaatttcccatctgggctaacaatgttccccccaagaacaaacactatctaatggaaaaccccagcagcaggcatgagaagccctcttttgagttgttggtcagggttgtccaggagacttccaaaatattctaagcttggttgccccggggtagaaggtaagtccctatggctgaagacaccacacacttgagaaacaaggcacagaggcccctaactggaactgacctgaaaggccccttcctgaggacaagctctcagttcaccagaaagcaccatgcaagcttccaaagaaggaaagcaaccaacaggcccacgaagctatgacacctatgacccacaataacaaccactatggcaccataagcctgagggtgcattagcggcacacattcttggcaaaccagtagctctctaactgaacttacggtccacccaacaagagggaaaccattctggtactagaaacctagccaactacctggacatactgaagtcatggatcttggaggggaacctacaactgatacttcactaacccataatccctaagtacattctaaatgttcaccctgtatccacagagagattagttctcactacccattcaaggaaacttccctctgcaacagacagagaccactccagaaaaccacatccagtcaaaatgcagagctcagtcccaactgacacacctacagcacaactcagtcacctcaggctcagagatcactgtgggggagagggctggaagagtgtaagggccaggggaacggggctccatgtgagattgctcctcctaaaaacaccagaagagctacacccatgaagtctcaccagcactactgtctaagcatgagctgaacacggatgtcaccaatagacacactaatgtggaagagggaaaccctacacagagaaccacaggcaactaaggagggctgagagtgggggagagcgtcttccccaggaaagagcacactgactggttatccagtgccaaatggtcgggcatccctgaaaacatatgcatacaacacaggatctgagcagactgtatttatacgtttaagagtatatgtgtatatatgtaacaacaatcaaagaaaaaatggccatgaatttgaaagacagaaagagggaggtgtgcatgggaggagcttcagggaagaaagggagggtggttaataatgtaattttcttataatctcaaatatatacatgtgtatacacacacacacatacacacacacacactaatgctgggaagtacacttaacccagcaggaataaactgcactatcaacagacaaccagaaacacagtctaccaaccgtccacataccccagtgtcaacaatctttctaatatcaagaaattaagggaactaaattaagaagtcagtatgtgacaattaaaatcacctcaccttatccatcaagtaggtagcagcagaaaatcttttaaccaagaacgtgttccacatcatcaatgcgatacctaacacagaaaatgaaacatgaacagagtgctatagattcatcagacatctaactctcttccccaagcttgtgaaaccatgtggactctatatttacatatttttttgcatcttatacagaattttcatttttaataaaagaataagtgaacagaagagtatagctataaatattaagtataaaattcttatcacaagcaacaaggaaaaaatagcatcatcaccaccaccaccaccattaacatcacacagcctccagaaaggttcagaatgcttgtttgttatattgggggctgtagaaaacagtactttaaaacattaaaaaatacttaaggaaaaaactcaactaagcaaacaagaacaaaacctgtgcttttatttgcacagcaaagcagtatttccatagtcgggaaggaagcaattacaaggggtgctagtcacgtctattatacaggggatcccactcgtacaagagggcttgctgtctgctactcaccattttgaatatgtgcgttaagaatgtgcttcaggtgttctatggacctaaccaaaaagcgtgcttccttggacaggagagagagagggagagaaaagatgacggttatttcacaccagtgaaaacctttcctttaagagttagttttatttatgtgtatgtgtctgtggcgagtgtatactgtatgtgagaggtcacctgcagaggtagaggaggacatgggattccctgaagctagagttacgggcatgtgtgagcatccagactagggtgctgagaactgaattcagctcactttaaccaccaagctactctccagcctccaatggagccttcttactcaatttctgcataaatttatttaagaatttggcaaaggggctggaaagaaggttcagctgttaagagcactggctgctcttgcagaggtcccacatgatggcttacaattatctataactcaagttctaggggatccaacaccttcttctaatctccaatgtcactgggcatacatgtagttgcacacacatacatgcaagccaagagacacacagacacaggaaggaagaggaggaggaggaggaggaggaggaggaagcagcagcactggcttccgcaacctaagctgcagctgttgggtgtggtagcacacactagaactcaggagacagagacagattggatctctgtgagtttgtagccagcctcgtctacatagtgagttccaggacagctagacctacacagtgagaccctgtctcaaaaacaaacaagaaaacaaaaagaaaatgacagaagcagagggatcatgtgaactacaaatggaattccaggctaagctatatagctaaaaacctgattcaaacaaacaagaaggacggagacgatggggaaaaagaaaagaaaaaccaaagaaactctgtgaattaggtaagaaataacttttgataagataacttcaatcatttcagtatctaattaatgattaatttctagacacaccccacccagatcatgctgacagggagattcaagctctctttggtctgtatatcacacaattgttctctacaggcaatactagaatttcacaggcatgaacttagtttctttttgcaaacaatcattatcaacaaattgggagcagctactatgcaccaaacctctaagaggccccaggaatatgaccctgaacaaaatggacccagctctttgtcttgcctgagggtggagcccagtgagggaagtagacagtaagcacagaagtgaaggaaatggtacagagaaaagaatgagagccaagggcaggaggcatcagaggggaggcttaaagctatctatctgcagtcacaaagggtgtagcatgtcacactcacaaaatcatccagaggtttgctaagatcagaagtctccattattattgtctcacacaagatgatactggaaattctccaaagataattcagtttaaaatttaaggtagatgtgtgtgtgtagtgaagctgggatggggtgtgacgcgttaagtagatgaacagttaacaagaaggacagccattattcaaatagtcctaacagaggccaatgactgcactaacgagaacactgggcgctatgcaagccactttctctactcctccaagatgactatttctgtagaatattcttgtctaggaagaaattgagacacgggctcagggatgtttcccaaggtcatggcagccgtgtgctgtaactaggattagctgggaggaacagcaccaggtacagaggcagtcgagcccactctattagcctgaaccacacactgcattgtcttctttcttttaacacaggacagcactgtcaccaggccgctccgggatacaggttctctccatacctgaagatatgtgctttgcccttgttctcagtgaacgtaacaagtgtagttcttatttcctgctgcatttcggtatgaaatggcactaacctaacagtatttgtcaaagcaagggttgaatggtagtctagtgtctgatggctctagtgtctctgtgtttaccacttttgttctatttggataagaacaataccccagatacagccctcctgtgtacatggccaactcttgtccaaggttagccttgctggcctctcaactctctgataaggccacatttcccgcacttttagggtcacaatctttctgggggcactttggtctgaaagtaccctagggagtagccccaagtttggctttggatcccaactgaatggctgacatacaactgaccaccaaatctattatcccaccactccacccatttaaggaaggcatcaatccttcaggcttgacaccaagatgaaacaagatacgaaagcatctcatagctattttctttgccaccttcttcactcaagcctccctcataagtattcttggaaatgactcctcttggatccaaactctttctttgaagtctttatcttgggctttaaaaatttcaaaggtgaattaactcacacttatacaataagaaccctttcttccacctaataagggctctttaatatgcaatgatggtatatgttaagagaatacactaatagagtgatttaaataatagacttgtccttgttaaaccttaaccaaaccttggtgccaggatgggaatcctgttcctctatcaccttcccactgagtccccacagcagagcactaattacagtctcgacttgaccacatgtttccagtcaatgagaaaaggaatgctagaaccacaatgaggatacaactcctcaaatctaaatgaattaccgactgaggtctaaagcagtggtatttgagaacacagctggccactgcggtacacactgcatactactcaggaaagccacaagttcaaggccagtaagggcaactttacaagaccctgtctccaggaaataactttaaaaggactgaggatatagatcagtgctgagtgcttgcctagcaggcatgaagctataggtgcactcctcagcactgccacacacacacacacatatataaggcaatgtgtgcaaagcaccgagcagttactaggacgggcgggcacaacagtgagctccaggacaagcgtggcccgggaacttgtgtgcagacacaatcagcagacggagacggatgtacctctgggtctttattccactggacgacatactcccagcagcagtgtgcatgcagcaggtcaagctcaaggctacaagggaactgttcataggctaaacgcagcaagtctgaaagacacaggagagtagcagcaccctttcagtaatgggaaagcagctacatcactccaccccggtccgtaatgctcattatttgggtgtcacctggtatggctcctaggtctatctgcacctctggcacctcaaggaaccttcgggcaataccttctttgggttcatctgggttttctgcatctctttcttggttggcacatttcaacaattcagggttgaggtcctgtttaaatatccacttggctacactgtctgcaacaccacctacagggttgagagaggaaagagaatgaaatctggtgaaaatgtgactagcactgtactaaatggagccgaatacagagcatttgtgcaggtgtccctcagggacagacagacacaccacactcacttctgaatctcgagagaaggtgatgccaaacagccatgagattcataacagtgttaatacctgtcattcagcttgggagggcaagcaagacagttagttgctacctgggatggagagagaacacgagcgggtactagggcgcatctggaaagggtgagtaactgctgggctacagcacagcaggaactccaaggtaaaaactaaatgaacattcagaccagacagtagagaagactctgagtgctcctgacacaaaacaatgcctgatagctacataatggatctgagctaatgatgcataaacatattaaataagtattaagtaagatgtcagtcacactgtacctcataagtataactactatgtggcagtgaaacataaagcatgtactttaggaaaacttagcaacaccaaggggaagaaagagaggaagggatgacattattagttttaaggagatggggggaagagaacactggttgggaatggtctcctggagggacccttggatggacttttgaacatgagcaagacttaagtgtccatgagtgggtgaggtggaacagggagaaggatggacttggatccaggatgggagtctcaaacatttcacttcatgaaaacctagtgtaaaattaattaaaaaacactcactcctatattcacaacacttggctaaggaaggaggaatctgagttcaaagcaagcctgtctgacgaaaacaaaatgagtaaacacatactcaaagtgatggatgtggacatgtgcaaacactcacatgtgctccgtgtctcaccttttcctccttctagcagttttttaacagaaagccttggaagtggctctgactgtggagatgacaccctggaagctggggtattggccctgctgtgaagcagggtctgcaggatgaggcagtcctctagctgtttcagcaggagcttccagtactcggtgtcaagagaaagggcttcccaggagtctgtgagggcttctgcatcagcacccaaaaccgtctgggaaaactaagagaaaatatcctgctcagcctctgggcaatctgcctgttttccttgtgctggggatggaacccatggcctcacatatgctgggcaagcactctaatatggagccccacccccagtcatctggcaaagactttgaataacattaacttaaatgaaagcaacagagacctaatcttatgagactggaaacttgggacatgtagaagaggccctgtgctgctaagtcaggctgggccagtgtgcatcttgaagggtattcttgccttcagctcgggctgctttgcttcggacactgacagaatgcaccagccagctctcactgcaaacacctccatctgctcatgttacacttagcccatatcttccagggctgacaatgttgatagtaaaccactatagacccactcaggtgctaatctaacatcctactaggaaaaaccactgacctaccacgcaatgtaagagaagcaaatctttttttcttaatgtgaatgaaccctcaggagaagggggaaacccacacagcaaatgtttgcttgagtgctggtccatctgactcagtgcaggtgtgtgtgtaagaggaggagaatggagacagtcatgggcccgcaaaacccgaacaaaccgaagaagcggtccagtgtggccctgaccccttagtgaggagagcatcaccacgctcacacatcccacatcccagatgctctagggcactgaaggatggaaatcacccacagccaaccagactggcacagagggcagctgaacagctgcccactcactttcttatctgccacactgttggacatctgtgcagcaacagagtgcccaacatgagcagacagcagggcagctccattgttctccgactgaatacaggccatgcgcatctgctgccaccaaggggacacggactgagaatcccatgtctcatcaatggccactgcagagacaagaaggaaagcaaaggtgagctcgcaccctgtctgtctgggtgtgcagtacatgggtcttaccctttatgtttaagctaaagccctcaaagaggtatctgcattcttctaaacgctgtacaagattaatatcatatgccagctaggtttttatcaacttgacacaagctagagtcatctgagagaaagagcccgcaagtgagaaaaatgcctccataagctcagcctgtaggcagcctatgcaaccttttcttgattgctggttgatgagcacactgtgggaggtgccagcccttcgtaggtggtcctggggttttataaagcaggctgggcacagagagcaagccggcaagccacactcctccatctctgcttcagttcctgcctccaggaattaagctcactgatctcagtgacagaccattacctggaagtagaagaagaaagaaaccctttcttcctcaagttgcttttggtcatggtctttatcacagcaataaaaaccctaagacattgcaactgattttattcagaacatttatcttccatttctttatattgttagtcatgctggttcttgaatcaataccaaactctgggtgtttttttttttttttttttgtttttttttttttttgttttttttggttttttaagggggagttgttgttattttaggatgggttttttttctgtgtaacaggctctggctgtcctggaactccctctgtagcccaggctggccttgaattcagagatgtgcctgcctctggctcctgagttgtggaattaaaggccagcaccaccactgccagaccccaaactcttatttgaaatattttcatcattattaaaaaggaataatgggggagatatacacctttggaaatttttattatttactttaatgtatgggtttttcatctgcatgtagatttgggtaccacatgtaggtctggtgctcacagaggccacaagagggcaatggatcccctggagctcgaattacaaacagctgtgagccaccatgtgggttctgggaatggaacctggctcctctaaaagagcaatgagtgttcttaaacactgagaaacttctaccaaaataggcaaaatattatttctaccaaagaccattttccatggcatcacatcttctgagggtggaatttcactgtcctatatgaaagcacatcacaaacacagagcaagctttcgaccagtgcatgaagacttctacagcaacgcagtcacagagccaaggatgcaaaccagggcctgtgtacaaaggatcctcctagctttacgccccaccaaaaccttttctacaccgtagtcttttgttgaaagaaattccccgtctttatgtggtgtttcaaagactatgttttatttcagagcatcgaagtggaaaccctgagaacaatggcccacaagatgtaccatctcctacctttcatcttgctcaacagggacagcatggtatgaagacagcagacagactgtggtttgtccaaaatatctttttccttcgaaagccaaacacttaggagcagagactaaaataaaattaaaatatttttcagcctaaataatatttagcaaaggggacatctcacagtttctccagtgtgcaggtgctcatcatgatgcagctctctcgtgtgatgtgggggtcagactgaagtacactgtccaccaagagactctcaacatctgccgggtgcctgactcccaccccttctacctcctcttaggattcacactgtcttccaatctaagccacagttaaggagacaccaccaggaagacaacactgggacattcacctgctgagtaacacaccagctgcaggttctgaaaggagacatagggaggaagggagggagggagggaaagaaagggaggggggaggaggagggagggagggagggagggagggagggagggagtgcctgtctgcaggattggtgagccccctcttctccacctgtgtccatctcccaaggggtgaggactctcaagtgtggtttctcctcttttggcttcgtcaagtcctggtaccaggcaactacggctctcttgggctcggagccctgggtccctgctctgtgtctgatgaatcactgagcagcctatgccttcttgaaattgaccctctctgaattcctgggatgctaggaattacagaccctcaggtctcacttatctttctcactcatgggaattttggcattgtctatacctccaacttttgctctcaatgctcgatttaaaggcttctaaactcatccgcctttgcagtcagatctggcacaaatatcccttagatactgctttctgattcgctctcttccacctgcaacaaatctgctttctgattcgccaatggctctgcctttcattcaatatcaacagttgggctctggtagggttatccatttctgcccattccccgatgtgaggcttcctttcccaagcacagtcctttcctctccttctggttcttctccaagtcctgataccagactgtgtctctctcagactcaagagcccttggcccctgtttttgcatgatgatgtactgaagcagcttgtgtccattcagtctaacactccctggatccctgggacgaagcgtattcaggtcttgggtcttctttctgtacctcactcgatgtgcccaatcaatcttcctctgcctcactcttgggaactgtgtcattcacctcctcgctcccattgggataacttttggagacccactgaccactccttttaaatcaaatctggcctcagtattccttggaccagacaatcagggaaccaagaaagaattccccactttttctttctcactgtttcaaacctgcgttctactggattgggaaccctgtgcaagtggatgctttcttcctgacccttctccttgttctcctatttttaacaaccacaccttgcctcatcaatcttctctatgtgtctccaacaatacatttaaaaatctcccatcaaacaactaatcagctattgttacaggactaccaactgttagccacagagctggaggtgcaagactaccaaacatgtcaaggtgggagaaccaacagcacccgcttggatccacctcaaacagcattcaccagcgaggtgcctgatggttccaaggagcttggacagtgaagtgacacagccagctaccccagcatctttgttcacactctaaaatggtttttctcttgctgaaaataaacaaagtttcctaacagctaagcttttattcaaacgtagattagcacaaaatgcagatgagttcccatcagaacacagcaacatattttcagatacactcataacagaaagctactttaaacttcagggacaatgaacgtaaataccgagacagatgttcacatgggaacacatgctgataccacagaaaagtaactaccaagtgaatacaaaggagggcagtgttccgagacagcacagcaagggaatgcaccatgcatgatctgagcacgatagcatgaatccatacatgtgaattatcctgttctacatataaataagccacagacagtcatgaaacactgccagggtaactgattaggaacagtacagacgataaaatttagtgaactttttagttctattagttaatacctaagacttgcagagatctgtagctaagaatgaaacagaaactcccacggctccaaagccagagagcacagcctttggggacacctccttttatatccatacccttaatgctttcctcctgccctcggaggatgcagataactgtgaggacaccctctgttagccgtgcctttctacacaaggcaccactggtcagtctttcacccgagctgcattttctagtctttcctgaatacaaccagaacttgataaagccagaactgttgaaaacatgaatatgctaacacagcactacagtaactaaattaattaaatgcctggaaacataattacatctagaaagcctcttccctctatactaccagggaggactcaacccagggcctttgcacatgccagacattcactctcctgttgagctggatccctagccattttgctttttaaattttgggacaggaccttcttattgaggtgagcagactgacctgaatatccacagcccaggcaggccttaaatttgtggtcctgtttcttctgcctcagaagatgctattatagtatagctatgttttcactccgagctggaagcctttctaaactaaattttttctttccctcctctattcccctgccctgactcctctccacctcaaactcctcctcttatgttctgtcatgagacaatgtctcactgtatagtccaggctggtctcaaactcatggccctcttgcctcagctttctgagttgctaagattacaagcatgcactttcacgaatataattctaataagggtgttacttatgttaaaatggaaatgcagacaatataattttgttgctacgcaacacaaaatacaaactaagaaaacttcattccaacagctccatctgaatccccttcacagatttttatttggaaagcactgcagatttgatggtgataatgaataaagttaagcgccactgaggaagaagacatctgatatcagttttggtgctccataggacccgtgtgtgtgcctgtatgcatgagcaggaggccgtaggagggagcgctgaggatgatggataacttccttgctctttgtatttcagttttctcactgactgattcttgtgtttcacacgtgtgtaatgactctaccctcgaatatttgaggcttgaaaattctgacatcaattttatacacattttagggaagtttgttctttaagatctctctcattgtaatataatataacaactaatgatcaaaatctactgtaaatggattcacctgttagattatttatttaaggccaaaaatttaaaagagaaaataacaattttaatatgctaattacaattttctttgatcatttcagttttttaatgtatgttcttgatatgctaatgataatgatttggaacttaacacttgcatgtaacctttgcaaagggttcagtaacaaaaccttaccagtaactgctgagggctaagtccggcagactcgagagtgtgacacatatcctcagtggagctttctccatgcaaacacttccaaaaaaagaaactgcctagcaaaacaaacaaacaaacaaacaaacaaacaaacaaacatattactgatgatgaatgttcagattaacaatcttatttaactgcaaactggaatctgagaggagcaggacagcaaatgaaagaagagaatattttgttgtggttttgttttgtttgtgaggggttctctctatatagccctggctgtcctggaactcactgtgcagaccaggtaggtgggcctcaaattcacagagatctatatgcctctgactcctgagtgctgggattaaaggcctccacacccaaaagaagagaatttagggtctgaatttgatttaggagaacagagagaaaatcattatgaattaaaactgtctcctgtgtgtctattgtatgtgtatgtgcatggatggagctcagaggtcaatgtcggaggtcttcctcaaatgctcccccaccttcttttttgaaatagatcactcactgtacctggatttcatcagctaggcaagactaggtgaccagagagtcccggggatcctcttatctatgtttctccagtgctaggattataggcagatgccaccatgtcttgctttttacagaggtgctgtgattcaacctctgattcctatgtttgcatggcaatcactttactgaatgagccatctcttcggccccaacacttccttagtagaaggtttattaatacaattaaaatgtgtgacatggtgtgtggacaccaagaatacatgactgaccaaaaaaatatgaacaccgagttctttggtcattgaatttcaaacaaaagcaaacactgagttgctgtacacttgctccaagacgcctgtgggagagggagggcgtacggaacagattacaggactttacctacctagagccacacactcctcttcactcatcttctttatgctgagcacatccttctcatactctagatattccaggaaggttttgacaggcagcactccgtctgtatcctcagaaaaccggacagaggtcttggtattttcttgtttgtacttctctaataaggcccggagctttgtgagttccttatcgtccagcctcagcaacacagccaagtcctttaaaagtaagagtaggccttgtctctatgaattgccacaaacactagccccttattggagttgagattcaaggccgttgagcaatggtggccttaaaaaattagtgtaaaatattacagaggtaatgtactgtttcaaatgttagttttaatgccatttcatgagtatgatgttatgtaagtaaactaaccttgaaaaactatatactagtaatagtgccattttaggaaatttctttagagtactatatttacttctaaagttaggaccctaataaaaatgtattatataacagaaaatatcacaaagtatataaatgtaactgaactacacatggctgcatgtctctgtgcaacatgaatagtacgccataaacacaccccatattgtgtctcctcataggtcttctttgcaaccagagacacaaagatgtcaagtgccccaggacactctggtcacctagtcttgcctaactgatgaaatccaggtacagtgagtgatctatttcaaaaaagaaggtggggagcatttgaggaagacctccgacaatgacctctgagctccagcctttcaaaccatttcacacagaatatatgaagacacacgacctgacgttatcagtttttttttttttttgaaaacctgtaaatctttcatagcaaggaaagccttttgctcagtgctacacaactgaaaccacaatcagacacattgaactccatttgttttgtttttttttctttttgagatggtgcttaattactctgtcttcatttctggacttgtgatcctctctctgcctgccaagtaactgaggctccagaacagtaacaccatgccgggatacccattttcaccaggcacattcaagagcatctgcttttgatgagaggaacctaaaaactgtacaaacaattcttcctgtaaacctctctccatcaactcaggcattcctgaagttcacaattactgaagtagatagcttgatcctaaagatcataatttttaatggtaattagagaataccactatgaatgtattttaacactaaagtgttaaaatctaaaatcccaaagaccagaagatatcagaatgtattctttcatttttcagtttaatattttttatacagttgtatatgtaaccttaccttttagtaagacaggctaatttttaaacaaatattactgatgacaaatcagtaatattatgtgtaatattatcagtaatattatcagtaatattatcagtaatattacttggcaaatcactagaatcattttaataaacctgccttggataagcagaagacatggggcctccaggttgggcaacccatactaggggacagttatctgagagaaagaaagacattctatctctcaagtttccattcagggaaactctgaatgcacctttagagcaactactgaactatactgaagactaaaagggactgttctcacgacttgatgtcttacacagacaacatctggtacagttatctttaatactctgatgtgagagagacgattttagaattgtatttccatgtataattcacaaaagagaaagcagcattaatttactaacaatgcagaactgacctcttctttggcagaatctttctttctttttctttcttttttttttttaaggcgggtttttctgtgtagccctagttgtcttagaactctctctgtagaccatgctgacctcagactcatagattacctacttctgtctcccaagtgctgggattagcggtgtgagccaccaccaccaagcttggcagaatctgttttacattttccttaaaacatggctactaagaacgctcagcaagtgagaccatggtctgcattcagtctctggaactcgtggagggtggagagaagcaactgcagacagttgtcctctgaccaccacataagctatggcagtctgcaccacacgcacaggcacacacacagtaacagtgacatgggaaatgcaccacacccacacgcacaggcacacaaacagtaacagtgacatgggaaagtcaagaaatgatagttttgccacatcagaaaactgaagttattgttattatgaagttttcaaactatcattttaaaagtcacctgtggtggcttgaatgagaatggcccccataggctcacagatttgaattcttggttttcaattggtcgactgttggggaggattaggaagtgtagccctgttgaagactcactggaggagggcttggaggtttcaaaagtccagccaggcccagtctccctccctccctgcctgtggatcaggatgtaagtaagctctcagccccccaggcctgcctgtatgctgtccaccatgataatgatagactaacccctaaaactgtaaacaactttctaactacatactttcctttataagagttatcttgctcctggtgtcacgtcaaacaataggacagtgactaagacatcatcttaaaaaattgtcaagaaaaatctaaggagtctaaaactgtaaagatcaattaactatgagatttaatatttttgtatttttacaaaatataagtctaataatataaattaagcagcaaagggtaaaaaggaggcctgatagagaaaatacacctttaagctcttaaaaacaataaatccaccccaaacctttaattttctgtttattaaaaaaattaagaattaaaaatactcaaagggattacggtgcataataataatatttgtggttactcacattatcggagaatggtgtgtctgactgaaaatcaagagaatttaactgactgacagattcataaagatgtagtaacttcagtttactggcacaaagctgcagcagtccttcatcgacagactccaactctaaaaggtggagggaaaacataatagaggtgtttagcagattcataatgctaaatgatgtcatgatctcttaaatttgtaattccttaataggctaaatactgatatgtttaacctatcatagagttggcaagcatagataatttttccattacactaaaatgtctaacttttaagtgaaataacattttctaataagggaagaagatgtacagagcaagaataagagatttttgagtggtaccttttgtgtgtgtggttttttgagacagggtttctctgtgaagccctggctgtcctagaactctctctgtagaccaggctggcctcaaattcacagagatctgcctgcctctgcctgcgaatgctgggattaaagtgcatggccactgctcggcctgtggcacttctatttacagaaaagtctttggaaatcctgggcttcatcccagtgctatgcactcaccgtgctcacttgaagacacacggctgtcaggctgcctggctctgcttattatcaagagggtcaaagacaatgatgttcggccagaaatcatggactgtgacaaatgcatcttcaaaacagcctggcgaaaagatctaaagtaggattccactgatatcctcccaataattggctcattttgcttaagattaacgctgagacacacttctgtatgatagcttaagtatttctcactaatgtaaaacaaatatatattctttaaaaaggcagatgaggaaaacttgaagacctcttatttaaaacaaagctgggcaggggtggcacacgcctttaatctcagcactcgggaggcagaggcaggcggatctctatgagtttgaggccagcctggtctacaaagctacacagagaaaccctgtattaagtgtatggagtaagtaccggcctatccctctacctaccacctatcacctgtcagtcatctatacattaatatgtgacagcatcatacatcccacaaggaaatacatgatctgaagtgaaactgtaacagtatccgttaccttggtttttcaaggtgtccattaaagtctgagtcacatttctaaggcaggaaaatgataagcgttcactggccaaaatgctttccagagcctacaacagtgaggaattctagtgattataggcaaatttgtactcattttatacattgtatctttgcaatccccaagtcaatacacacacctggaaattcaagttatatcaagagtgctatgtaaccaatcctatgtccagactgagaaggaaataactagagggcaactgctgggtcacagaatggccatacaacatggagaggacacagctattccccaacagaaagtctgaactggcctctactaggaataaatgagaagcagagaggtgactggcatgctagttataaaagctgacaacgtcacaaccactcgctggatatgcacacggcaggctgacactgcccccaaggctagctgacacagtatccattctaaccctcattctcaacccatccagatgtttaaacatcttcattcacaggctttaaaatacctcatgatacctcagccaggtatcatgattccctagcagccagggaagacatcaatgaatcaggaacagttaaagttcatatttatccttttatactagcatattaaactggactttaactgatggacacacagtttaaaagccctaacctaagctctggtaggacataggacttccagcactcaaaaggcaggggcaggccgacatctgtcagttctatgtaatccagagagctacatagtaagaccctatcagaaaaaagtagactacagataaatatcagtcttataacacaatgacttttacgtttgagggagtgaagggggcgtagaaggtgactcacaaaactaccagtcttatcatgagaacagaaagaaggtgagcaaacagaccagtattcagggtaaacgcaaccctcttccatcccgccaacaagcaggctggtgggagagcacactgtctctcctcccgattcaatctcctaagtctttattgaactctgcctttcctctagtgttgtaagccaacagacactttggtttttccagcaccttaaataaaatccatgtttttgtgtacgatttgataaaaaagagaatccttcctaagacaacttgtagcctgtcatcactgagccctgctgggatgggtgggaaggataatgatagcatccaagagagaactcctggtttatgtctttttctgtttgtttactccctcagatggctaccttatcaaaacatcatgttcaatagctgagatatctgtcctgaggaaaatggaagccaatgagcagtcaatggaatggaaattagagacttccttgctctttaataaaacagagtatttttaatgactccaacacaaatcactcacttcccatcagtttctcccatataggtagtggtctctgcccgtggtcctggcatgcagctcctctagtttctgatggtaatctcctgagtgacaggtgctgggagggtctgttctaatgactggtcttggcccctgctcctggaacaggtgtgctaaacccctacagagcagctgggagaaagctctgctgtaacatttagcatttgcccccagattcctgatacagaactcctgagacctttgtagctccatgggagagaacacaacacctgtttcaatgaggtaggctccggcgcagtctcaagatggagctagttaccatggcaaccagtcaggagattagagaattataattttagccccactcctaacctctggggaggagaagcacttaaggataagttgaccaataataatcaatgatgcaatcaatcacacctaagtaatgaaacctccataaactcttgcagggatagagggtttggaacttgagatgactaaggctttataccatgcagaggcttctggaggggacagggaggacacaccccctcctccacaagcactgccatgtgcacctagctagttatcagtattctttatgtttcaacatatacatacaagaatttccccaagttctgggagccactttagcaaacaaaagtaaaggacaggtcatacataattcatagcgggtcagaagtataacaatctactagttgtgggggaaagttttatgggcctgagccctccaggtcagtagagttcaagtgatctgaatgtcaacaatgaggctgacagcactgtgaagtgctgaggccgtggtgcatgggactcaccaggaaaagcgcaattaggagaagcaacctctcgtcccctaaccgagcctaggaaatgcacagcccagaaccccactctcaggtgtgcaggaagcacacacagggaagaccatgcatcgcggtttcactaagaaactagaagcaacctgaatggttcaatggcaggagagtgagctgcagcatgcacattagagggctgcactgcagttccactccgcatgcgtcgcacacagcaacacactgaaaacaagtcacagaacacaacagacaacaacacgtctccaattatacaaagcggcaaacacatcaagacgcttcggaggagacgcacagaaatgaagtgctggaaagagaacagcaatgctcatcaggatgggaggcaggtgggcactgaggagggacagctgctgtgctcctgagtttgtgtaagcttctatttcctacggtggtagctgtataccagtgcttatgttattatgtttccattatcccaggtttatgtgtgtgtacaaagcatatgcaatcacatatatggtaatattacttgtttgtttttctttaaagagagacactagatactccaacatggggctgtgaaaatgaattgttctcaggaccaagtgatgtatcagtttctcagcaggaaagttcacttactatacacacttacttgtctcttggttgcagggtacttaatatcaaggatcaactcctttatttccgtttcaaatgagtctataatgagaaaatcaggtacggtaagaaaatgagctaatgcactttctgtcactctaaaggatgcacaggctccctcgaattatcatcttactgagaagttttaataaccccaagaccagtggttctcaacgtgagggtcatgaccctttgaggggtgggagtgaccctttcacaagggctgcatatcagatatttacactatgactcaaaacagtattgaaactacagttatggagtactactgaaaataattgtggggtcaccacagcatgaagagctgaattaaagggctgcagcattaggagggttgagaaccactgctgtagatgcacgacatcctttcagagcactgacagatgtcacgtccctcatctcatcctggaaaagggttgagagagctcacaacagtcaatcacttggctgcactcacaatgctgtgacactactttttttgatcagaggaacctaccaagcccgggtgacttggttttcagcagggctgccagtttcttcaccaagtgcaggtccttggctctttcactcttcttatcactaaaataataaacacaacttattatacatgcatttgtgttctttctaatactgatgcaacttttctttttcatatgcttcccatttaacttcaaagggatcatgtagtgataaaacaaaccacaaaacactaactatgaaacaacaacaaaaaaagacttaagataaagaactatgcaaaatgtgcacagggaagtcatagcagacacaaagcaactcttacctcagtgctaagtggaaaggcacattcaccgttttcacacttgcagacaccgggtcaacaagacagatctggtaagtctgaggctgccaactctgacttgtcacattgtttaagcccattattttgtagccaggatacagcagcctaaggcaatcacataccagtttgtggttatcatcagcaggaggtgaaatcccacaaggtgctctgacatcttcatcaactcaggggtatccactgggcaaatacacactgatgccagaaagccaagtgaggcagaactaactcagatggagaaatctactttcttcaaaggttctaggaaactgcatgaacacaatcaaacctgcagccaatggtaaataaagcccgtaccttgcttagttagcatcacccgtgtctctctgtgacagtgagcgccagggcttgcagcttacctgcagtgcttacccacgttgaaagctcccactctcggtccttgctgtgtgttccacacttccaaaattccccttcgaggtgcatagatcacgaggaactgagctactcgactgggaccttgagtatttccaaagggggacaaatcccccttttctggtactcgttcatggaggtcctctacgatttgaatccatccgatctgtgcatctcggtacccttttaggcagaaagagttgctaatcagtttattcatagggctcaacagtagctcctcatgcacttctgactatttaggggagggagggcatcaagacaagccacagaagcatgttatcctttaattcctagagatcttaaagaaaaggttaaaaagtaatagcctgtcaccaaagcatcaaattttaatatttctctatgtatatttgcctcagatcactcttctctttaaaaagaaagtactgcagacatcatcacagtttcctgattcctccctgcctgggctcccatgcccttcctttcctctctgtgaaagattcctcactaaaaaaaaaaaaaaaaaaaaaaaaaaaaaaaaaaaaagatctggagaccgtattagtttggctagctaaaatataagcaaaagatcaaattgtcttcctgctatcaaagctccttgatggtacagaagatggaaagcaggaggcagagtggcataaggaaaatactaatagctggtgctgtcctgtttgggtggccctcttataactaaaatacacggaagggacacacgtgcctgaagcagttgcaaaacgcaggcaacaatgtcagcaacaacagtggccttataaagggaaaggagtgctgcagggacaagagactgacaatgacagaattgaaagtgaagtgcaggacggaggaggcggcaaatgccatgggacagctaagacgtgccacactcatttacgctgtggaacatttgtttaatggtgcaaacatgtgttgctttctttcatgctgtgtttaactctgtaaagctgtgttactttacctgcctaaaacacttgattggcctaataaatagctaaatgtccaataatgagacaggagagagaaataggtgggctagtgggcagagagaatacacaggaggagaaatctagggaagagtgaggagagaaaaggagaaggacactagtggccagctgcacagccagccacacaacttgccatggagtaagaaagaaagatatataaaaagcacagagggaaaatgtaaagagaaacgggataatttaaattagaaaagctggctagaaacaagccaagctaacaccaggcattcgtaagtaagaataagtctccttgtatttatttgggagctgggtggcaggctcccaaagagtaaaaaaaaaaaaaaaaagaaccaattacaacagttaaaagtgcctatggtgagccaggtgttggtggcacacgcctttaatcccagcactagggaggcagaggtaggtggatctctgtgagttcgaggtcagcgtggtctccagagcaagtgccaggataggctccaaagctacacagagaaaccctgtctcgaaaatcaaaaaaaaaaaaaaaaaaaaaagtgcctatgatgagttggaggtatagttcagtgggagcatacactaggccctgggtataaaaccacaaacaacaaacccaaactagccaaacaaaaagcccatgctttaattaatgatatagcaactaagtaccagctgagtgttgctgacctgagttgacattaaaaagaaaagtgatagagtatggaatactgttactaaccaagagctgaaggatgataaagtcgctcagctattggggtaaaaagtgaggcaacttttccctccatttctgtagggaattacctttccacatccgtattgcaatccctcgagagacgtccaacaagataactctgccaaaatcgtctgtgactgcggccagggtgttacaaggagataggcatatactttctccatgccgtctagaatctggaagtccaaatctgtcattaaagagtaaataaaaactaagatcacactcaaagatagatatgtagaataataaaattcacaaataaaatagactatttctaaatgaggaaataaaccttgtctggattggtaacttgttggggagtattattttaaggtgtgttacttttgtttatgctgtggaacacttgtttaatgatgtaaagtttgtgctgcttttgtttctgctgcacttgtttaactctgtgaagctgtgttactgtgcctgtctaaaacacctgatggcctaatccagtgcagaacggtgccagagagaaacataggcgggtctggcaggcagagtatacacagaaggaggaacgagaggaggaggaaaggacttcaaaggccagccctcagtcacccggctacacagccagacacagagtaagagcaaagaataaaaaacaacaataactcatcatagttggcctttgcaacacaaacacacgaaagaaaagcatccccacagcactattttctccttcctgttctgaataagagtcttgtcacagaaaacacacaacaactctgctccgggatgctcttcgccaacacaggcatcttctgtctcagttctccacatctgctctctgtctagggcacaccttgctgctgccaaggcatctatctatctgtgatgcctagaatggtaaggagcttgggctggactgagaaatgcctaggacattaataaggcacactttggggtgtctgtagtgttctgccacagatgactaggtaatgagggctctgaccttgaatagattaatcccttgacagatttatgacacgatggcattattgggaggtgttgaaaatcagaaagggacacacctaaattgaatgctgtatgtcactggtgtgtttgtgtgtgtgtgtgtgtgtgtgtgtgtgtgtgtgtgtgtgtgtgtgtgtagtgtcctgggggtcacatcttgctctggtcttttcctggattaagaagctctcctccgccacatgtttccactgctatgatgtcctcaagaacactggaccaactgacaatggactgaacccttttggaactgtgaaccaaaataaaactttcctgctttaagttgtttctgtcaaatattttgacctcaataacacaaaagtaactaaccccctgtctgaagcaagaactttctaaagtgtttctgctaaagtgttattggctttataaccaactataagaattaccagtgcgccagaagtaaacaggaaatgaaaagagagggagttcacatagacaaaaaccttaacaaacttggtcacaatgatctgaaacccaaaaggccatttgactaatttgtgttataacagagtaagagggaagcctggatacggctcagtgcagtgcttgccttgcatgaaggaggtcccaggactgtcaagaagaaaagtgactttgaaacctctttgtttaggaagtaatgaatgcaagcaacctacaaacccaaaaacttgatcttactaacgttagctttctcctggtgagagaggagaagaggagctgcggtgttacttccttttatgctgtttgttatattaggtaataagcaacaagtaaaaaggaagccaagcaaaaatcaagccttctcttcccaaaaattaaagtaacaacaaaagaccctctattcaaagatacactgctatgttcttgagtaaaacaaggaagggaatctagttcagaagagtcaccctctttaaggaactcatgatctggttgaaaaagaattccacatgaggagttctcaggacccaagcgagactaaatgtaacagctgctcacaccccacccccccaccaggagagagattcgctcaaagacttgcctcacagctaagggagtggctggctccattttgggcttctgcttctggatggtctcttcttcgtgcttgcttttccaaccaagccaaccactgagcggaggggacacaaataagtcaaataaaccagtggactagtctcaagggtcttagagtgcagaataccaaaatctaggcacaatcaagccagatccaaacaggatcagctaaaaatgcagcttccttacctggcagcactaaagagagccgaagtcagtttacttgcaactgcaagtgcgacatgggataacagcggctgagtgcttccctgcagaacagtcacgaagagaaaactgagatagggagcctgtgttctaaaggagactgacataaaaaagcaagtttcaaagtctgcagcagcagctctctcagcagcagcaacagaactgagcaagactaggatttataggtaaaatcgctggtagcccaaggtgctccccaagagttttgtcctcagcaatgcaaactaacaaacacactgcctggagcaagggctgcctgttgtgctgagctgctgctgctagcctagaaccaacctttagggtttctctctttaaactgtagcttaatgaaaaccaaggaggccaatagaacaaggccatggatgtcccaactgtacacagctagctcttgcccttcctttttctttctctttctcgcctctttctctttctctctctcttcctttttttctttcttttttgttttgtgaaacagggtttctctgtattgcttttggagcctatcctggaacttgctctgtagaccaggctggcttcgaattcacagagatccacctttctctgtttcccgagtgctaggattaaaggcatgtgccaccaacgcccggctcctttttctttttaaagtaaatacgtatttgtatgaaagtaaagagacagcttggcccttccagagaaggctgccaactgtaacagttaactttcctctatttcaggaaaacaattttcaaagcttatattaactataatgggaacttgctctgtctcacagctctacatttattctaatccctggtgggtggacataattaacaatccgcagctgcaccaatatttaaacaaaatgtagctgtcaaaaaacttagggcttcagagacaaaaaatgattggttttaccttgggtttttgttgcacgcatacacacacacacacacacacacacacacacacacacacgggtttttgttgcacgcatacacacacacacacacacacacacacacacacacgggtttttgttgcacgcatacacacacacacacacacacacacacacacacacacacgggtttttgttgcacgcatacacacacacacacacacacacacacacacacacacgggtttttgttgcacgcatacacacacacacacacacacacacacacacacacacacgggtttttgttgcacgcatacacacacacacacacacacacacacacacacacacgggtttttgttgcacgcatacacacacacacacacacacacacacacacacacacacgggtttttgttgcacgcatacacacacacacacacacacacacacacacacgggtttttgttgcacgcatacacacacacacacacacacacacacacacacacgggtttttgttgcacgcatacacacacacacacacacacacacacacacacacacacgggtttttgttttgcacgcaataccacacacacacacacacacacacacacaccaccaccacgggttttgttgacgcattacacacacacacacacacacacacacacacacacgggtttttgttgcacgcatacacacacacacacacacacacacacacacacacacgggtttttgttgcacgcatacacacacacacacacacacacacacacacacacgggtttttgttgcacgcacacacacacacacacacacacacacacacacacgggtttttgttgcacgcatacacacacacacacacacacacacacacgggtttttgttgcacgcatacacacacacacacacacacacacacacacacacacacgggtttttgttgcacgcatacacacacacacacacacacacacacacacgggtttttgttgcacgcatacacacacacacacacacacacacacacacacacacgggtttttgttgcacgcatacacacacacacacacacacacacacacacacacacacgggtttttgttgcacgcatacacacacacacacacacacacacacacacgggtttttgttgcacgcatacacacacacacacacacacacacacacacacacgggtttttgttgcacgcatacacacacacacacacacacacacacacacgggtttttgttgcacgcatacacacacacacacacacacacacacacacacgggtttttgttgcacgcatacacacacacacacacacacacacacacacacgggtttttgttgcacgcatacacacacacacacacacacacacacacacacacgggtttttgttgcacgcatacacacacacacacacacacacacacacacgggtttttgttgcacgcatacacacacacacacacacacacacacacacacgggtttttgttgcacgcatacacacacacacacacacacacacacacacacgggtttttgttgcacgcatacacacacacacacacacacacacacacacacacacgggtttttgttgcacgcatacacacacacacacacacacacacacacacgggtttttgttgcacgcatacacacacacacacacacacacacacacacacacgggtttttgttgcacgcatacacacacacacacacacacacacacacacacgggtttttgttgcacgcatacacacacacacacacacacacacacacacacgggtttttgttgcacgcatacacacacacacacacacacacacacacacgggtttttgttgcacgcatacacacacacacacacacacacacacacacacacgggtttttgttgcacgcatacacacacacacacacacacacacacacacacgggtttttgttgcacgcatacacacacacacacacacacacacacacacggtttttgttgcacgcatacacacacacacacacacacacacacacacacgggtttttgttgcacgcatacacacacacacacacacacacacacacacacacgggtttttgttgcacgcatacacacacacacacacacacacacacacacacgggtttttgttgcacgcatacacacacacacacacacacacacacacacacgggtttttgttgcacgcatacacacacacacacacacacacacacacacacacgggtttttgttgcacgcatacacacacacacacacacacacacacacacacgggtttttgttgcacgcatacacacacacacacacacacacacacacgggtttttgttgcacgcatacacacacacacacacacacacacacacacacgggtttttgttgcacgcatacacacacacacacacacacacacacacacacacacacgggtttttgttgcacgcatacacacacacacacacacacacacacacacacacacgggtttttgttgcacgcatacacacacacacacacacacacacacacacacacgggtttttgttgcacgcatacacacacacacacacacacacacacacacacggtttttgttgcacgcatacacacacacacacacacacacacacacacatgggtttttgttgcacgcatacacacacacacacacacacacacacacacacacacacgggtttttgttgcacgcatacacacacacacacacacacacacacacacacgggtttttgttgattccgacccacatatctacggacacaacacacacacaccaccgaaccacatcggttttgtttgcacgcatacacacacacatagcgacacacgacaccgaacacacacacacgggatgttctagttaattagcatttgcccaacattgctccatacacacatgacaacgcaccacacacaacacaggcacacactacacacacagcgaaattatcgagcctcccttttttgtagatgctattgtttttgttgcacgcatcacacacgacaccacacatcacaggtacaccaactggtttgtctttatgatgattcttcctggcagcgatacacacaacacacaacacacacacatcacactttaccgcgctgtttttgttgcacgctacacagtcagcacacacacccttatatctacctatcacctatacacgaaaaacggttgtttttagttgatgacgtccacttacacaccaggctagacacacacacattataccctttacacaacacacacgggttttgttcgcactgtctaatttctttgcactaacatcattctcacacactacactacacccatcaccacaatctttcacaaggactttgctttttgttgcacgcatacacacaccacacacacacacgacacacacacacacggctgtttttgcttgcacgcatacacacccatcacacataattcacacacacacaccacacccatcggcgtctttatgttagcacgcatactaccattccacacattcacatctcagacaacacacacttattacacacacgtacgccgagtctttttgctttctgccacgcataacacacaacacacacacacacacacacacggcgtttttgcctctcgcacgcaaactctacacacacacaacaacacactacacacacacacacacccaacggttcagttttttgctatgcacgcatacacacaattacacacacacacacacacacgtcgtttttctgttcgcactgagatacacaaacacacacacaacatttactttcacacatacttcaccacatctacggtttccttgttgccacttgtgcataccattcacacgacacacacacacacaccacacgggtttttgttcttgcacggcatacctacacacacaacactacaaccacacacacacaccactgggggttttatctcttagatcatcctcttgtttctcgaacgtaacgcctcatcattcacacatattttacacagggcacacacgacacacgggttttgttgcacgatcacacacgacacacacacacacacatcaccacacggttttctgtttgcacgccatacacacacacacacatcaccagcacacacacaacacacggcgttttttgttgcccacgcatacaacacacacacttacatcacacacacacacggacgttttgcttgcacgcatacacacacacacacacacaacacacacaccacactactacggtgtttttggttgaccagccgcatacaaccacgccacaaactgattatgcactaacgaccttacacacgacgacacggggcggttatttggattgcacgcggataacacacaccgacaccagcttaaccctatacacatcactcaccatactacgtactcaacaaatacaccaggaattatcacatgtatttggtatgcacgcatacaacaacactaaccacaattcaaaccccacaattaacagtcatatctaacgtcgttttttattaatataagcaagatagtagtaaacacacttccaaccttaacacagcacaaacacacgggcttttgatgtttgccgatatcacaactaccccacatatcatcattcgcaatcaacgcacaaactactcactacaaggactcccggttcttgtctacgtatacactaactacacatccacaacaccaccacacacgggttttttgcacgcatacacacacacacacacacacacacacacacacacacacgggtttttgttgcacgcatacacacacacacacacacacacacacacacacacgggtttttgttgcacgcatacacacacacacacacacacacacacacacacacacgggtttttgttgcacgcatacacacacacacacacacacacacacacacgggtttttgttgcacgcatacacacacacacacacacacacacacacacacacgggtttttgttgcacgcatacacacacacacacacacacacacacacacacacacacggttttgttgcaccatacacacaccaccacagcaccacacctgacaacacacacacacacacatcgcgggttcttgttgcagctatacaaccacacggatacacacaagctaactcaccaaacacatcatcagcatcccacgtggtatttatatgtcttgacttacgccctatcatacatctctacacaacatccacttctacaccacactcacacaccttacgcatgtttttgttgattcggcatacaatcacagcacacaaacattcactacaacgtacacacacgatctatcggacgcgtcccaggattcttgttattgccaaaggaatggttttctgttgtgcactatgcggatacacacatcaattcacttagcacacgacaccaaacacaggcacacacacaacgtttcacctgtgtttctggtttttgttttctgccacgcttgatacaacatcacacacacacacacacatatcaacacctacaccacttacacttcgttttggtttttgttgcacgcatacacacacacacacacacacacttaacactatcggatttccttgttgcaacggcatacacaaccattcacaccacacagacattcaacctacatcaggcacacgggttttattgtttgcatttgtccgcagtacacacacttaacacacgcatcgaaccatcactacacacacggtgcctaatttttttgattgtgcacgcaatacacacacactactcacacacaatacaataaccattgactttcacaaaggcacaggggctcggtgagtgtttttgcacttgcacgcatacacccaccacacacaacacacacacacacacaaacacacacggtaagaatgagagtttccatatcacgcctctccagtcataaattcatgtttttgttgcacgcatacacacacacacacacacacacacacacacgggtttttgttgcacgcatacacacacacacacacacacacacacacacacacacacgggtttttgttgcacgcatacacacacacacacacacacacacacacacacgggtttttgttgcacgcatacacacacacacacacacacacacacacacacgggtttttgttgcacgcatacacacacacacacacacacacacacacacacacacgggtttttgttgcacgcatacacacacacacacacacacacacacacacacacgggtttttgttgcacgcatacacacacacacacacacacacacacacacacgggtttttgttgcacgcatacacacacacacacacacacacacacacacacacgggtttttgttgcacgcatacacacacacacacacacacacacacacacgggtttttgttgcacgcatacacacacacacacacacacacacacacacacacacacgggtttttgttgcacgcatacacacacacacacacacacacacacacacacacacacgggtttttgttgcacgcatacacacacacacacacacacacacacacacacacgggtttttgttgcacgcatacacacacacacacacacacacacacacacacacacgggtttttgttgcacgcatacacacacacacacacacacaccacacacacacacgggtttttgttgcacgcatacacacacacacacacacacacacacacacgggtttttgttgcacgcatacacacacacacacacacacacacacacacacacgggtttttgttgcacgcatacacacacacacacacacacacacacacacacgggtttttgttgcacgcatacacacacacacacacacacacacacacacacgggtttttgttgcacgcatacacacacacacacacacacacacacacacacacgggtttttgttgcacgcatacacacacacacacacacacacacacacacacacacacgggttttttgcttgcacgctataacacacacacacacacacacaccacacgcggctttttgttgcacgcattacacacacacacacacacacacccacacacgggtttttgttgcacgccatacacacaacacacacacacacacacacacacacacacacacacacacgggtttttgttgcacgcatacacacacacacacacacacacacacacacacacgggtttttgttgcacgcatacacacacacacacacacacaccacacacacgggtttttgttgcacgcatacacacacacacacacacacacacacacacacacgggtttttgttgcacgcatacacacacacacacacacacacacacacacacgggtttttgttgcacgcatacacacacacacacacacacacacacacacgggtttttgttgcacgcatacacacacacacacacacacacacacacacgggtttttgttgcacgcatacacacacacacacacacacacacacacacacacacacgggtttttgttgcacgcatacacacacacacacacacacacacacacacacgggtttttgttgcacgcatacacacacacacacacacacacacacacacacatgcgcgcgcgcgcgcgcgcgcgcgcgcgcgagcacacaccccacccacctacccccttgtggtgacccgggagcaaggcctcctgtagcgcagactagcttcaaacttgctatgcagcagagaatgaccttggatttctgatcttcctgcctctgtctctcccaatgctaccacacctgcaatgctctgcctagatcttcagagcttttcagttaatccaaattatttagaagaaacttggactggtgacatttgtgttgggtaaagtacatacagcataagcctgatgacctgagttcaatccccagaacccacacagaaaagccagatgcagtagtgttcatctgtaaaccccacattcccacggggagatgggaggtggaactagaagctggtctcaggcagctacaaggtagaaggaaagagcaaacttccaagcattgtcctctgactctcatacacacatcacacaaacacatgtatacacaataatttctttcattataaaaatgtttggaagaaacttgtggttaattttagcttcaggtgaaatttagaattttaaatctaatctttctaaggcacttactgtatctagtttttaggcaagttaaaaatttaagagtggctccactcgggataaaactcatacctctagagcatagaagaagccggtgaatgggctggaccccacagtgatgtactgagacatggccggtggactgtttttaattgctgcattaattccaccgatgacagaagcagtcttcatttgatcaaaaggtgacagagtcataataccttatgattaaaaaagagacaagaaccagtttgaatacattgaatgacttcatttaagtgattatttacttctgttccaagatactgcttagttttatttcaaaaacccacatttgaaagtgatgacaaatgcccaaaccaccaacctgaattgcaagcatagcctttttttttaaatctccattagtttaatgtccccttgcaatgacattactattttaccaactgtttcaaaccattaatcttgctactttttcctctgttagtttccctttcccttatcattcagcttagacccatggtccatcacagaccttcctacaagcccttgcactaatcgggctccacatgctctccagagtacatcttaaccctggagtttctgctcttgaaaggaacagctgttgacacagaccccagcccagcccacttcccggctcttccccagctcccagcgctttgcagtgggtgtgctgagcaaagcagactgtctggcactcacatcccacgcagacttggctagcctgatccctgtgacgacactaacttgttttacctcacacactgctgtacactggctggcaggccgctgaatctagaagactggcggcttttgtcacaagtgcatataaggtgacacagctcactgggcaccctcctcctctgccatcccttcaaaagctgtagggccacttaaaacataaattcacattcactgctttcattaagaacgatgtaaatcttactccaggctgagaaagctttcaactttaattttatttccttagctgagattttcccattgggttataatcttgtcgttggaggttttccctgaacacaagcccttcatcctgtgaaacacactgaatgttctctgcacataaatctccatagagtcaagctcactggaccacttctgcttcctcctcggtacccatgagggagaaaccacacggctaggtgggcactgctcaggcagggggcagcaattatgttttgcagaaggcccctgggtgctctggggagccagaatgacaaaaaccggatacagtgagagatgggctgggagacaaggccaagcagcacctgtgcaagtaatgggcccccgagtacaagtgggcggggcagaggaggaggggaggagcaagaagagagcagcaagcgtgaggggaggaaattgagaatttaacactggaggtcaagtttggacatctgtaaaagtgttcagaaaaggagcttaaaaaaaagaatatggagcccaaagaactggtcagcactggagatgatgagtggagatgctataatttatttcttgttcttatttgttacttttgaaaataggaagtggacacatttattgtgaaacaaaccctcccctcccactgctcatcaggtgagtcaagagctccaagctggcctgctgctgtttccaagtatccacccaaaccacctctccctgcagtcccagctgctctgaacctctgtctgccggctccatgctacactacaagtgaaagcataactcgactttccctcctgacatctcttcctcattctccttcccgtgaacaacccgcttatccacccggctgctcccactatgcaatgacgacatcacctgtgggcccttgagtcccttccctcatttctcaagctcacacccgggcagctgtgtggcgctacttcacattactgcttccgctctaagccggtcattctcgagcgcctccattaccaaaccactcctcctgctttccttcctcctccacacaggtccctaaagagcatccaacgcgacctttggtttacttgaaacagggcctctctacacagtcctggctgtcttagaaagcacaaatttaggataaaattcaccttccttattttcagctctgaccctctgtatacccctgacttcccttgtcacaccatcaaggaagtgctccctctcttgtgctcaaatccgttgaggtctttggggtccccaggcctctattcacactgtgccctctgctgagaatgctctgactacaaatctttcagcagctgctccttctcacccttcctgtctcaatgcaggtgaatgctctggagaggcccgttcttagcagtctggctctgcacttcctctactctactccaagggctctcagtcttcctaacactgcaaccctttaacacagctcctcatattgtggggatccccaagcagttgctgctctataactgtaactttgctgctgttaggaatcacaatgtaaacatgtgtcacacaggctagcttgtgaaatgggtcaccaccacgggttgagaaccactgctctggagcatagctccctgctgagttcctccgagacgcctactagtggactgacagggccacagctactcattcagttatgttcatctctatcccagaatacaagcgttctcagggcagggtctagactgtcatgtgtttctagtaccagcattacctaaggaatattacgtctttggttattgaatgagttaagactttacataaaggtgtacataaaataaagttcattgaaccttttgtatttttgtttgtaggctggggagtaaatgaatagaacagtgctttctatccaatcattttccccagccagcttcaatgttccaaagtttaattaacagagcagggaagagaccctgggctggactcaacactttggaaattctgttagcatttctcttaggaaaaaactgaagacacaccaaactgtttaccaataaggcagagtactcgttgcaagattgatatataggatggtgtagacagagtcagcaggcctgggggccagccttctgtcagccccacacacaactctggcctttttagaccagactttcgacagctcctactgacttctggctgaattcagacaggattcccatcaggagaccagagagggaagaatgaaaatgggatgtgacatcttttccctgaaagctggctgtgaccctggaggaaaagtcaccctgctccccagatgctgatcccagcactctctctaagagaggagggctctctgtccttgactcctcagacttagcagtccagtcttggtttacggacatccctggtgtgtctgcactaacagaccctagagcctctctgtaaagaacctctcaagcctcctcctcaagtgaaccatcagtcttccataaggaccgaggctgacaaaaatgtataaaagcacaccttccacacaacagtatgcatgttatatatgtatttctacacagactagggagctaacaccaatgagggtctctggagagtaggagatttgttttttctctatatatttatacagtattcaattttttaaacatatattacagcaatgaaaaatgtttttaaataatatttctctttcaactttctcttttatcaccttaattaaaaagaccactacttctcacaaaggtagtgtttccttactagttttttttctctttcttcctttccttccttccttccttccttccttccttccttccttccttccttccttccttccttcctttttttaagttaagatggactatggccacactgccaatgctggatttgaatttgctatcctcctacatcagcctgcagaacagctggaattataagcatgtacaaacatacttagctttttctttttttaaagctgtatttattatgtatataagtgttctgcttccagtatatctgcacaccagaagaggacaccagatctcattacagatggttatagccacgatgtgtttgctgggaactgaacacgggacctctggaagagcagctaatgctcttaacctctaagccatttctccagcccccttttctaacaggcaatgtgagcgagttagttctttgctgagaattcagtggttcctgacatggctgagaatagcctaagaaagatttagctactcctctgtgtacgtctgagcggctttcaagactaggccttgtctatgtccccatcctcactctcaccaactcgcctggcactcactgtttctccagcacattctgcaactcaccctggaccaacatgtgtgttagctagagggcttgttcttttattgtcagattaagtcaagttggtcagtgctggcgttttctctttctccttgagtcctactacagctgtctactcttatgtgatctttcaattagcctcaagcttctagacagtcatgatttttcatctctttacttctgccttgtttttttccttttcattcttatacacacatacatgcacactggtacattttatgagtcttatataatgtagtctggcctcaaactcccagtccttctgccttgtctccagagatgacaggtatgtaccaccatacctagtctttcatatctatattcttgaaaactaacacagtaagccctcaaatactgtcatgggaagaaatctgcttcatatatgttctgttggtccaatataaggtcattacaagaatcagaatgtcagtagacaaatgacaccagaatagtatctactcaaaactgcagtattaatgctaaaagtataactaaatctttattaaaactgctactttatcttaaaaacagaaacctagctgaaaaaagtcagaactaacttcccagtgacaaactaaaggcaatggatttttttccatgtaagaatatagtgtcaatttctaataaattagatgcttttataaaaaagtgtaagaataaaaatagaactagcaatacttaccaatactagcatgatcgacaatagtgtcaatgtcttgtagaccccatttcttgtaagctaacggtggtggttgtatgttctcattgcctgatgctgcagctgtcaaaaacaaaaatcagaaattgtaatggatagaatgtcattttattgaaaagacatctagtatataatttactgttctaaaatatcaactaataagaaagcacagtaactaaaaatgcataatatgagatttactcatgctatggcaacacacacacaaatgcaactgctaaggaccctgctgaacctagtcttgcgtgagcagtagtctttgcctatggcagacaaacttgctggcaagatggccccattagtattccacacaagcatgaggacctaagtccaaaaccccagcagccatgtgaaatctacagtgtggcacctgtaacgggcctgtgatgacaccgctggaaggatggacaggcagttccctgggctcactggccagctaatctttctgacccagtgagctccaggctcagtggaccttctctaatgaatgaatgaatgaatgaatgaatgaatgaatgaatgaacacatggctgaaaaaataaagtcagtaagcagcaaggggacagtgctgagggaacacccttgctgttgaccctagcttccacacacactccatcctcaccacaatgaggctccttgattatctgtgcagctttcacctctaatgacgacgtcctcacacatgaagtttagacctccgacacttcttcactgacaagtgtttccaataaagaggctgagctgacctgctgggccccctcccctgtgaggaaatgtgccagcacacactgacacctgtatcctcagtgaggtgagaggcaagggagtcaggggattttagggctgtgtcctatagcttctcatctagggagaggtttgctagctgcacccaaatcctcacccagtgaccacctctctcccagccaagctatgctgctgagttaagtgaagaaagcatcctgctctcaggctgccacaccccactgccaacatctgagcagtacgaggctccagcccctgcttgtaaacaacactcccctgcaggagacacgtcacttgtgtgaggaggccacactgaatgaaacgctcatgactgaaggcagaccctccaccacgacattaccttttgctacctggtttcgacaggcacggagagactgaaagagactgaacccgtcaatagtcacaatggcagccgggtacaggatgctcagttcttcattctgtgtggggatagaaagaagagaaaagaaaagaaaagaaaagaaaaaaacaccatttttaaaacagacaaaataaagaaacatcttcctttataaaaacacttaaggatcacactcagttaaataccatgactaaacagtcaactgtaaacatgaagcaatcagagaatgcagcagaaggcagcacgaactaatttcaggacaccttctggccaaagacttcaacttcctctcaaacatgagctttgcaggtagtaggaaatggatctggataacggtgtgaataaaaattttgctccagctcacgagaagtatccattattgagatgtaagtcagcagaagctcacagggtgtggtggcgcacccctttgattccagcagatctctgagttcaagaccagcctggtctacagagtgagttttaggacagccagggttacacagagaaatccagtgtttaaacaaacaaacaaacaaacaaacaaacacctcaatacctcacttgaaatcagaggcctgtccaaatactcattctcaaataaattcatacacatttgcataagtctatcacacacattttatttatttacttataatgtacacacatttagcctatagcacggtactgagtgtgatgcctccaagcatgaatgcaacattcattcattcattcattcattcatttatagttacagtgctgaggacttaagccttgtacataagcaggcattttgtcaattatgcttcattccaatctaattttcccattttattaagaatacagatctgatttaattttgttttttttgactcagtctcctgcctcagtaatttttaaaaatccaatttcaagcagggcatggtgacatacacctataatcacagcacgagggaggcagaggtaggagggttatgggttccaggataacatgagctacacaaagaccaaagccccaaacaacaaacaccccagccccaggcaccccctgactctagtttctcacactgaggcccaagaacaagtgctccagtggcctgtggctgcacctcttccttctctgggagctcctctaatgccatgtcaattcaattcagagttcatacaaactttgagcactctgcttaccatcagtttcttgatgtctcctagtgggtttccttgctaccaagtacaaaattctacattggagccttccctcacttctgctcccactaaccagttaaattgcatgtccattatccaaggctcacagaaaacctcaccctttccctaaatgtgtagtttatcttgatcgtatgactgattagatgtttatgttactaattacttcattcttagatgctaataaaatctagtttcaataattcctgtaatttattgtgcaatttaagtccatgtatgcattcagtatatgtctgtttaacatggaattttctggaactaagtagtgcaaaaagaaagagtcattttaaagttttaactctgaatactataaatggaataaaaggctatgattactgttttactgtgagacaaacacttttttttactataggtaattttgacacttgcattaaaatttaaaatatgaagtttcattaatatggtttcacctatgtcactgtggtggtttggttcccataggttcatagatttgaatgcttggtcaccaaggagtggcactctgaagaggtgtggccttgttggaggaagtgtcacactggggtgggctttgaggtttcagatgctcaaggcctagtgtttctcactcttccgctgcctgcagatgtagggctctcagctcctccagcaccagctgtctgcctgcatgctgaccctctgaaactgtaaccccatcccaattaaatgttttcatttataagagttgccctggtcatggtctcttcaaagcaagaaaacactgactaagacagtcatcttaatacaatgtttcatttataaaatataaaggctggtattctatttagctacaaattacatttctagaatatgccagtttagctaaatgggccacaagacaattctctccatttccaagcaaaaaagcaaacaaaattgctttaaaacaatgtcattgctactttctttctaattgattttacatttatagatagctgttttacctgcatgtgtgtctgtgcatcacaggtgcctagtgcctgtggaggacagaaagtgcgcctgggggggggtgtggggggggagagagttgtcctgatctccttggaagttacagacagctttggaccaccatgtgcactctgggaattgaatctggatcctctgaaagaatatccagtgctcataactgctgagccctctctccagccctgccactgttactgtgaacataaccttcacattacctgctcagtcactccagggtgtcgggggatttcataggtcctgcacttaagctgaagcactttgtcctcgttcaaaagttgtgcaagcaaaagcacaccgctctagaagcaagcacagaaaagggccctgctggttttctccagtgtgactggacaggatgaggcaaacggcgccatttcccaacagtctcccaaggacactgggtcctccttattctcaagtggacagcgactcttgtttcttccacagatgatccctcacctgtccctcctccaccccataaagcagtggttctcaacttgagggtcacaacccaaagaccatcggaaaacaatatttacatcacaattcctgacagtagaaaaattagttatgaattagcaatgatgataattttatggctgaggtcagcacaacatgaggaactgtattaaagggtcgcagcttgggaaggctgagaaccctgctcaaccatcagctacgtatttcccagcattcacaggaagactgtcctctcagattcccaccatattcttggcagcacaacatgatgcagagcgctgcagtcagctagctctctctaccgctggaaacgcagctcacctcagtgtagaaccgcacgtaaccagacgtaaaccccaccacaatgcaagtccagtcgggacgtccagtggaactcctgtcacatataaaatggatgattgtaatggcttggtcttcaaagcagaagagacacagaacccatactcatccttacctcttctggcttgccagcgggatgcaaagggcactggtcacatactccctacagtcagaaacaaaagcaaaatcacgagcttagtcactgtgcttagcaataaagtgagtatgtgcctgccccccccctctctctctgtgtgtgtatgtgtgtgtgtgtgcagccctggctggcctagaactcagagagattcactcactttgccttctgagtgccagggattaaaggtgtgcaccaccatatctggattgtttatttctctataatttaatgttaaaaggcagtaggtggaagatgacatctcatgggccagttatatttagtaaaatccatacacgtaacataacaaaaagcagtgcttttccactaggtgttgagatgaaacaaagtaaaactttatataaatcactgcacagaaaacctagaaaatctcaaatggttgccaggcagccatttcccagcatccctgtctttgacagtccagagccactgtgcctccttgtttgaagagagtgcagggcagaaggaactggataccggatttctgtgggtactttattttaggaactaactacatttcttttacactttacatacactgctcctaaaaggctatttctttaaaaaatttttaaagatctgtttactttattttagataaaggagcatgttgtctacatgtactatgtgcaccatgtgtgtgtctggtgcctgaggttttagaagatggtgtcacatcttctggaactggagagactgaacctgaagcctctgcagaagcaacaagtggttttactaagctgcctctccggtccccagtgacctatttctaaggatatatgagggttgtttcccaaaggtgatttgttttccctaacatgtaaacttgagatattgttgggggctcagagaaaaagacttgaagtctaaacacctcctccagactgactttgtttaaatatcaaatcgacacaagctgttcaagccaacgtgcatgaagccccacagaccatgtgtggtaatcatgatgcaagggcaatcttcccttgtggttgcttaggtgacatatttccaaatggcatcccttagagtatatgagaactgctctctttcatgttggtgacagcagaaaatacctcactgaagatctacaatgcactggcatggatgaggcacatctcatctgattggccttccagaagattctgattcattctgatcacagctttcccagggtacaacgtttagctcaagcttccaggctatcgtgtccattttgtaatcaccctagggaatcatggtctcacttactaggtaaataatttgccttcttgagcttaagaattaaagctacgccactacttgccaagtatgagcctgtgctggctggtgtttgtcaccctgacacaatcaagagtcatctggagagggggctctcagctggtaaaatgcaccccagattgcctgaagatctgcaggcattttcgtgattcatgattgacatggggatggtccagcccactgtgggcattgccagcctggggaggtgatgctcaggtgtgtaagaaagaggatgagcaagccagtaaaagtagcatccccagtggtctttgcttcagttcctgccttgagctcccagcctggaacttgatgatggattatcagctgtaaggcaaacaaagtctttccaccttgttttgatcatggtgtttatcacagcaataggaagcaagctaggacacagcccagatgatgaccactgaccttcccttccctaaactgctggagggcagaggaaaagacaaacacaaaggattttatgagatgctttctgaaacctcctcacattcgtcacaggttggaaagaaagctcagtgtctaagaggtcttgttgctcttgaagaggatcgggttcagatctgataccatcttttgacctctgagggcaccaggcacgttcttggtgcacatatacacatttgtacacataaaattaaataaataagtctttaaaattatttttattcagattagagtttataaaaaattacaagagtgctgggcgttggtggcacatgcctttagcctcagcactcgggaggcagaggcaggtggatctctgtgagtttgaggccagcctggtctccagagcgagtgccaggataggcggctccaaagctacatagagaaaccctgtcttgaaaaacaaaaaacaaaaacaaaacaaaacaaaacaaaaaaaaaccttacaagagcaacaaaacaaaatctgctaaccaaatttctctacaaccagtaaagttgggaaggatcacacacacacacacacacacaaaaaaaaaaaaaaaaaaaaaaaccttgtaagcaacgaaatagatgcatttacaaacaaacccatttcatacatttcacacacacacaaacaagtgaactagtacctacccttcttccacactcaaggagccactccagccaacagcaaactgcatctcttccttccctttatcaccatgcttccattttgctggggggaaaggagataaaataaaacctctttagaaagctgagtataaactgtctgtagaaactgacttgggtatttagtataggtcaagacatagtgtttttagtttgtaaaagcattttctaagatcctctggtcccctagactttggtctcttctttctccagtttaaaccacaacttactactctattcagaatttatttacaagactacttttattttcaaatggcaaggttaagttttatattgatttatgccatgggaatgaattttctctctaagactacccacagacatcttataatcttactttgttctttgttctatgaggcttttcatcatctatgtagctccaaatcttaatacttaatcttcaacaaaaaagtatgagctgaaagctgatgcaccagtttatagtatatgtgagtttccaagctgcagctaagggactttcacactgttgtaaggagccagttttccagcactgaatatccctgataagaattaggtaatggccagcgctgtctgagaggtatctcaggatagcttgaaaaacaaacaaaaatcagaggcaacacagaaaataaaaagaagtgctctgggtctaaggagatggctcaacctgtaaagtgtttgctaccctagcattctctctctctctctctctctctccctccctcacacacacacacacacacacacacacacacacacacactcactcacacacacacattcactcatgaaagggagggagggagggagggaggaagggagggaaagaaaaggaagggaaaggaaaggagaaaaaggaaaggagaaaaagagccaggagcagcataggcctgtgagctcagtgccagagacaggaagttgccagggttcagccagtttgagctccaggttcagtgaaggaccctggctcaaaaactagagtgaaaagcaatagagaaggacacctgacatcagcctttagtcatgtgcagaggggccagcacatacataaatacacacacacacacacacacacacacacacccataagggaaatattctatgtattattaattgtagtacataaattacagaaccaccatataatatagaacagaaataacacatttccaaatgcatgttctgttctaatctctgcactaaaacgaggcaggagagaacaacagtacttacgcactaaaaatgcagccttttgttcccgggctatcaccataagatcactggttggagataaggataaaacacactcttgaagccaggaatttttttgtgttttagaagtatttccttcttcttcctatgcataaaaattcaattactataaatacaaaaaaatttaaaagaatactgcaactgtgcttgcctgtcatgagtgaaagggagagaataagaaatatctcaattcttccataccaaaatatgtcaatgacaaccaccaaacaaaaactactataaacacatctgttgtgaaaactaacacaaaaccttcataaataaataccatggcattatcagaacgcaatccaagaaacaatcagtagtaactcagtattaggaatttcaacaggcagtaataatgtctctctcagggtcagcaagatggctggatgagcaaagtagcttgccaccaagccttaagacctgagttcaatttccagaattcacatgctagaatgagaaaacagactcccccaggatgtcctctggccaccacacatgtgctgaggcatgcacatgaccttgatgcatacacacacacacacacacacacacacacacacacacaaataaataggtatctttcagaaggctctagccaactcatgatctactctggagagagccagtgaaactattaacatatgttactttgcacatctaagcaaataaattcactgtgcttcctccctttttccttgtgagaatgcacatataatatatgcatattttaacatgttgctgtcttcattccacaagaagtttttttcctctttttttttattttctttctttctttcttttttttttatggcttcacagtattctgttaaaaggacacttaaaatacaggatagagaaaaatgttttggataacccccaagaagcctgcagcctctggtgtagttacaggtgcttcccttcacattaggaataagaatggatttggagccagagctaagaaggctccaaatgcaaaacattcttcaaaataggtaggcattattactggcaaaattcatattttagtcaagctgtttttaaagtgaattctgtatctatgcttactaaaaacatatttttctacagaaaaactagaaagttttccccacagataaatggcagctgtaattatatttctccctgaatccatggtttctactaggacatggtctgtttactacacacagtttctcaggctccgcagtgtggcccatttgtcagctgagcctaccatgccctatggcctccccactagtgactgagacccaagattctaagtctgagtcctgggtcctttcatgtaagtgagatcccaccttcaagcactagcctggaaagagagcaaaccacagaggaacagtaagtacttgattaaaagaacagtgacagtctagggatgtataggcagacacccagcaaagtcagtatttctttaaccacgcctttaaaaacatctttccttttccccatagaatcatagggagtggcattactggagctgtggccttgttgaaggaagtgtgtcacattcaggtaggctttgaggtttcagaagttcaagtcgggcctcttgtccagctctcttcctgctgcgagtggatcaagatgtagaactctcagctacctctccaacaccatgtttgcccaaatgcccccatgcttcctgccatggtggtaatggactaaataaacctctgaactgtaagccagtccaaattcaacgtatttctttataagatctgctgctgggtgtggtggtgcatgcctttaattccagtgttcaggaagcagaaacaggtggatctctgagttcgaggccaatctggtctacaaatgagttccagaactgccagggctacacagagacaccttgcctggcagggatggggtgggatggaatgggtggtgtgtgtgtgtgtgtgtgtgtgtgtgtgtgtgtgtgtgtgtgtgtgtgtgtgtgtgtgtgtgtgtacacgagtgcacgtgctgtggtcatggtgtctcttcatagcaataaaatcctaactaagacaccctccatgtagagttccagttgctttggtaactgcaccctatagtaagaaattaccagtacggagtcaggtagaaatataagggtatttaatagggaaaagccttacttacagagcgaaccagccagccggtggtagtctgtacagcaagaagcaaagagaaaccgaaaccgaaaacgcagtccccctactcactctgaccacgccctcacaagccctcaggtactcttgtagccagcccctaagaaggcgtggctacagcttcccctacagcaccctattctgactttcaccttcttgaacatgtagccagttgacagagaggaacaagggttaacaatccagcttaaggcacagggtagcagcagcagaaatagaagctactcatgaaggacggagatgtgtctgaaagagttcctgtgtcagatctttcaaagacacttcaattcaaagcagaaataatttgacaaaaataccccaggataggggcaataaagtagcccctatctcactcaggctggatcacaataaactagcactagcgtccgcacaaggcgcatatccaacgtatcaacagacagcaagctgcacagaacaagctatgaagcccaaggcattggcgcacatttggtagctggcaagatgcagcatcactgcctgtaacaggaggacctttgcttgccaatcagggttttgaaaaacttagccataataatggtccatggtcactaatattgctcccttgaagccagtgatcctaaaataacaccactaactgaaaatatggttaatttcccaagtgagacaagaaattaaaaaggaagaaaatgaagtgccccacacttaaaccagaattttccaagtttcccataaaagccagacactgaagttaacactgagtccattatcacaaatgtgaccctctcaggggagggaagaaaccccggtcttcatctgactagtgcgggaagcggccataggccccaagaaagcattcactctaactcgggacttcaccatatccttaacattcttccttttggttttcaggctattaatttgtcagatgaatcattttttcaggatgcgtcagatgacagtccaacggctgtcaccatcaccagcctttgcttgcagacagcaggaccacgctgatgaatcatcattgtctgacatctattggtgtctccgctgctgtaagaagcagccaccaaagcagtcagggcagtttctcagtttacacttttgaccttggatgtttttttcatggggctaactttcaaagtttttatgtatcacggggtgtcagtaaaatccaatgttctcagggtctatttccatactcactgtagttctagtgggtggccaccagcctcagaaatattcactcacactttctgaaagcaagagaggcaacacaaaagcaaggtctctatgctgagtttcctggtagtctgcttctaatctatgttatgcccaatgcttttcaaatttccttttcctttctttcttgaggtaaggtgtaatgggacttcttgttcccaaacaaaattctacagaacagttcaaaagatgaaatacagcagagatggcaaaactacacagctcctctgccaaaccctatggcttcctcacatagcagagaaagatcagagtctgtaccactggaattaaagaccttacagtcttctcaaaatcaaaatggggcaaagcatgaactctctctaatttagttataataaagaaaaccctcttacaagtaaaatgggtgacaaaaacttacactctgaatctcaatttccaaaattaaaggaagtcagtaactttacagtttatttcacagtcaactcaggatcatttgttttattttcctggttttggtgctgagaactgaactcagagccttgggcacaacagacatgtgcatcccaatcctactgttacttatgtctaaactgcagagggcaacactattttatgtgattttgcaaagcatccactcgcttgccatttcaacttttgatctaaatagaaaagtcaacatggaaaaatccctggcattggtagtgataattataattagtgttacagagtgaaatgcttacatttttatgtaatacttgaaatttctgtagtaagcatggcacaaacaaccttgttttttattaaaaagcttcatttcacaattagttacaatggaactccaaacctaacaaccaagtgtctctatttcctgaataaatattgaacactgggcagtagatctctttactccaccaggtaccgtgtggtacaagaaagtaccaaataataatctacccagagacactgccattcagttcttagagcaacatgaccattaaatagtaacaatagtatccagtttaagtcagaataggtctgatgctaaatcaaatgctaagggctttgagttgctattagactttagaaacaacaaatagtaataagtacttgccaaaaagatttatatatggaaaatataagatgaccaatgtcatccacaaatgaaataaaagattaaaacattagcatttcacactatcctaagattaaaatttgataataaacacacacacacacacacacacacacacacacacacacacacacacacacacacacggcggggggggggggcacagctctgcactaagccaggtttctgaaccccagcactcctgacagtgtgaaccccagcactcctgacagtgtgagcaggatcatgctttgctctgggtgactattctctgtggtagaaactgtctggtgggactttcaacccctgcccattggactataccgctgccccaaaccaaaaaccatgattgtgtccacacaacgccaaatcactgtccttgttcagaggggccccattgagaatgacactaggttacacttggctctcaatagtgaccctctgtggtcaccttctaggatggctcgaagcagatcctgagcatggtttcaaagccctcttctgcctgtagcgaagctggctgtgtgtcccatgaagcagatggcaccacagtcaaatggaagtagtaaggctggagagtttccagaatcgtctcaaatgattgacactctaagaacatataatcagctagagttatattccaattttgacctataaataaacatttctccagggcccctttccaatcagcatgctttcctattaatctgataagtcatgattgcccttgaaaatcatattacgcacccttctgtaacccagatggaacactcttcaaagcgctctgagtagcaattgtccacgccgcccactggagctgagggccgtgggcagaccatttctgggtccattccgatcctgtctactcctggttacaagggagcggccatctatccttcctaccacttgctctaatgcaccaatgagagaagaccttaccaattttggttcacctaagtctccaaaagcttcttccaaaaccgccccagtccccttcatggcttgagactggctgaactaacattccacgttcatcacttacttcccacagcaaagcaatcgtagtcccagataaaagctttgtaatgctagaaaactaaacacaaacccttactgtttgtgtttgatttactgttacaggactgtcggttatctattggacagtatgcttgtttatcttcttttctgggtccccaagtcaaccactgccttatcatgatgctatcaacccattactattgaggaagattgctacactttttcttgcaccccaattcgccctgaatacttgtctctgcttgtctcctcattctcttattgcacttccttgtaggcaagtaggaacttgttagttgtcatcttctcatttgcccaattagagctgtgaccaattagacatggaaacgttactttgcacattgtatatattgaattgtattccccctgccaccctaacttgatatagaagcagtagccccatgtgactgtgctgagcatagggacaagaaaaaaagtgtatgttaattgagacccctagggtcctgtgccttatcctataggactcataccctaagaagatgtgagacaccagaacacactccacagtcccactttatttacagagaagccaaagaggacacaggggcacagctgtctggagcagtcagaggacagacaacacctggcatcttgttttcagctgtgacaagataaacatttgttctttaagtgtcccagtctgtgataacatgttatggcacctgagcagataagtacagggtgaaatatctaccttaactgcccttctcctacaatcagatcgatgactacctgaagtcaggtataaggaagtgaaggacctcccatatcaactaccttatatgccatcactgagccttcatccagtagctgatggaagcagatgcagagattcacagctacccactggactgaactcctggagtccaattgtagacagggaggagtgtagggggaaatgctgaccatgcccgcttggggctggcacaggtgttgctcgtggtcagagtgacgtagcaagggtttaaatatcagagaggcaggtaagaggccctctttttctctctcccgcttggctgaatggacatctgcgggtgactctggctctggtgtaaccctggtcactggcccttgcatgagtactatccttttaataaactacctgtagtcaatctacttatgactccatagcattgggcattagaggagcaataatatgagcaaaagggtcaagaccatgttggggaaacccacagaaacagctggcccaagcaagtgggagctcactgactctggactgacagctggaaaacctgcctaagactgaactaggcctcctgaatgtgggtgacagttgtaggacttgggaagtttatggggccattggcagtagcaccaggatttatccctagtgcatgaactggcttcttggagcccattctctatggagggttaccttgttcagccttgatacaggggggagggccttggtcctgccccaaatgatgtgacagactttgatgattccccatgggaaacctcaccctctctgaggagtggatgggggttgaagtaggaggacaggagggagaaggaactgggactggtatgtaaagtaagaatgttttaaaaagaaagaaaaagaaagacacacctaaacctcaaaggccattggtgtcatagtcatagatacagaccttcttggatatggctcttggtgatgcagatattggaatatgattttattgttttgtttgcataaagagcactttgttgctcagtgatattattattaaaaaaacatacagataatgtgtctggaaagatggctcagtggttaagtgtgctcatcatttttctaggggatgtaagttcagttcctagtacccatgtcaggcagctcacaaccacctgtaactccagctccaggcacgcatgcgcacacacacctttttttataaaccctggaaaaagtaccttgttttcattttcaggtcagtgtgagaaagacaagacatcctgagaaacaagtccaggaaatacaactaggtctctgctctatgtttccaagcaattcgcagcatggtcgggaaggagcctcgctgacaacaaaccaagtggacagaagccgaggacagcctagtctatgccttctctacaagccagtggcctacagtgtagccagttgtgccaggcttggggccatgtccctcaagcacttggtgctgctgatgagtttacactccccattggacttaagaggtaggtcaaacgtgtaaggattcaggctacagttgcttggtccctggatgtttcagttcacaatgaccaatgaactcttgaaagtagacaatgaccacagacacagacctccccaaccatgaacctatttctcagcatgagtaagatgagattctcccaggaggaagccaaacccttctgtagtgaaagatcctctttgccaccattttcatttgaatcatccttctgactttaatgtcttcttgaagaaaagtcaatgtgaccaaaggttcctggggtacaatgtactctccagagttatcaagctctattcacagctctgtgagctgatgggacagctggggtcatcatggagtagaaggaagtagaccatggacaccaacatcttcttggtggtattccacactctcttattgcagacttataccctcaccaacctttccatatgctgtactcttcattttgaccatgttcctcctgtcaccatctttcaaggcatttataacttagtgttttgttttgcttgctgctgtcacttcctcacagggtgacttccactccactggctccagtccttgtttcagctgacagctcagaatcacaagagcaaaacaggcttctcctttttaggaaaggctcttccagactcccagtattaagtctctcaaatacaaaagcctttttttactcttccaagtcaccacaatgtggaacaactttcaaagtgatgaaaggcgtgcgtgtagaaacaagaagcaccctgcctatactgtttcccgctgggttctagacacacgggatggcctccagtcagcagcactcagttctagacacacgggatggcctccagtcagcagcactcagttctggcggttgctgcttcactttctctttgaaacctctctctgtcagttctcctcatgccactgctgcaccgaggactagctctctaacgatggaccaaagacagaaaaattcacttttctccactactcaccacagcctccgcccaatggcagctgactgagaacaccttcactgtttacagttacagtgccttgacacaacttaacagtaagtgaacagcaagacactctattcccactgctggcaccatctttaatgcagacgaaaccagctatattcttgtggaagtttgagtaacctagcaggagcattcaaagcctccctcccagtggatgatgatgtttgctaccttgaccaggccttgcactgctgtatttcatgtatctgccaagcttttctcttctgtttgttgtgcctctggatagaaaccattagagttgttcataatcaccgtaagtagtggaaataacagtcttacatccactgagtgacatttctggcagtcctggaatagctgtgagtgtgaaataatgaaaaggagaaagacttccagaccacaaacaaatgaacgttctgaattataagtagaagccaggcagtcctgttttaactgcacatgatatgctcacaacaggtaaatccatacacagaaagtagatcagttgttactggaggataggtgatgcattatgggggttcttctagggaaagtaaaatatcatggtcttagatcatgatgataggtacataactttgggaatactaagaaaactgattatatactgtaagggtgaattacatggtatatgagtcacagcaatataagaaacatttaatataacaatacagacacaaatctgagtgattaaaacggtacactaaacatttgtttaacacaaaaagatggagtaaagagttagacattgtgatggccaatcctggttatcgctgactgactgggttatcactcacaagcctgataatctcagttcaattcctggaacccattaaaggtgaaaggagaagtggctctacaaagttgtcccctgacctccacacatcaccccttacacacacaaaaataaaacgcaattatgaagacttacaggttcttgggattctgtttcttcccatgctccccaactatcatcttcccagtttgatgatttacctagagagacagagtggggagggagggagagagagaacacataaaattaaaaggcttaacatattttaaacatttattttctaaacataacagaaacaaactgttttttggttttgttgttgttgttgttgtttttgagacagggtctcactacatagttctggctatcctggaacttgttatgtagaccaggctggccttgaactcacagagatacccctgcctctgtacagcactgctgtaaatatacagcaacaaacacacctaaaatttcacacagatgttttcaaagtgaattgtttcttgataggacaaggtatccatggaaacaacctgaattctgaaacaagacaagctgccttcgtcccttttttgttgctcttgtttcttacatttgagacaatcttcttagattaaaatatattcactgaaatatgcaacaaggaattaaaaaccacaggtaagtttagaaagcacattccttgcatggctcatgttgattttatataatttgcttagaatttacttaaagcaataaaattatcatctccaagcaaccagagacaagaatgagatattctatcacccaaattaaattagaacaccaatgaagttccaataagactcaggcctgagactcagactgcagatgtttcacctgaattgtaacaattttcgacttatgaaatgtgttatgaaatacctagagcttgttcaaatcccagatgcagtacttcctacctctgaggaagcaaattacctcctctgtaagctttagcttcctccatagcactttgagctatggggctgtgtaaggactgaaccagacagcatactgagggactctgtgtcggatatgtcagtcctcactgctagccatcatgattcagccaccacgtaccacaaccatgaagtagaaacaaaatgtgtttaagtgatcagctttcaaaccccgagcagaagttagcatgaaagatgaacaggatcttgatgactaacgagagagaagcaatgataacacacacatacactcacttacacactgtctttaaaggttgctgaaacaaaggacatggatgatttaaaaggggttacagtctggcacttggaataactgctcaattagcttgtagtaacaacagtctaatcttcagcacttaaatgccaagtaattacttcctaaaattccaaattcactgctaggcatatattaagtcctaaaatagtagcacgctttgattaaaatcacatgatctgaagattcccagatacaagtcaattaagtcaattaacaattgctctgttaaataccatgtaccaaaccttgtagctaagaaaagtacaacacagtccttgctcttaaagaatctatcatcttatgcgggatatggatgaacacttaactatagcacacaatgagtgctgtaattgctacagtaccttgacacgatagtgaaatagttcataggtatacaaatgcacacacatatactctgaataatcattaccatttttatttcataggtatacaaatgcacacacacacacacacacacatatactctgattaatcattaccattatttattaagactttgtttttatttttatttatttttatcatagtacatattcgtgtgtgtgtgtgtgtgtgtgtgtgtgtgtgtgtgtgtgtgtgtatgagtatctgtgtgagtgagtatgcacatgtgtgtgagtgaccatggggactagaagaaggcatcagatcccttggaactagagttacaggtgtttttaagccaccgaacacaggtgctagaaactgaatttggatcctctgaagactgcgagtgctcttaaccgctgagccttctctctagcccctatttatttttgagacaaggtcttgctacagagccctggctgaccttaaacagatggtcctcctgcctctgcctcccaagtactaggattacagatacatgacacctcacatgtccaaaatagcgtctttacaaagtagctataaacttttcaaattaactggaaaaacataaacataaagcaaaagcctaaacgcacagaacactggtgatgatactagatgccaagtgctgtgcgcaaagcaattcactgaaccatcataaggttcctttacaacttaatgttaccaggagaaaacagactcatcaaaaggttaaagagcttgccctagatcacagaagtgagtggaaacctaggacttaccttcaattctgccatcattgcccaactcatgcccttgagatccaggcacacttccttccatgtggttcaagaacaaacacaagagaaacactggagcctatgaagaagacagagtctctctgtctgtctctatctgaggcagggtctcatgtatcccaggctaccctggatttgctgcatagctaaggatgactcttaaacttctgattctcctgccttcaccagattgctaggattataggtgtgcaccaccacaccagggttatgccactctgtggatcaaaccagggcttcatgaatgctgatcactccccacctgagctagagtcccagcccttattaattaattaattaatttcttgtttcttttacattgttttttaaatagaaatatcccccctaggctctatcccaaaggatatgatagactctgatgacaccctatggaaggcctcaccatccagggggagcagaaaggatatgtgataggtagggttttagttgggggggtggtagaggaggaagggagggagaagggaactgggattgtcatgtaaaacaatcttgtttctaattctaataaaaataatctgaataaaaaagaaatatcccccaatactgacgttaaagagacgttttaaaaacttgaacaatttgccaagagtgatgatataaacctttaagtatcagcactctaaaggcaaggagagtagatatctgtgagtgcaaagccagcctgatctacatactgagttccaggccagccaaggctacacaataagacaatatcttaaaactactttggacaattaaattttgggggttttttggtcaatataattcattaaacaatctcttcattcattttactacatcatcaaaacaaactatcttactgtatgttgattgagacaacttagccaacctattaattgttttagaagccaggtggtggtggcacacgcctttaattccagcacttgggagacaaaagcaggcagatttctaagttcaatgccagcctggtctttacagtgagttccaggtctgccagggttacagagagaaattctgtctcaaaaaaccgaaaaatacaaaacagttttagaatatacattgtttcttaagcaagaaatttaagtctatgcttcatatctaaaattgctataaaataatggaaatatcaaattattagaacatcaaaacaactttgcagaatacaagcctttcaggaagtcattcgttcattaagtagcaccttttccatgctagacatcagatagaaaaggaagtaagtttccaaagggctcagttgaagcacacaatctttattgaatgtacaacactataaaaaggattttatttttcctttatactagtattaaaagaacctgactcaattcacaaatgactcatacaatcaagcagaagacagcagttatttggatttcctgcccctacagagacccagtctctcttcatgcttcagttcaaagcatgcccaaagagaaagactgacaaatatattatttgtttcagagaagatttacccagttttcaatgtctggctacaagactgttttcaactgaaggaaaaaaaacaaacaaaataaaatgaattgggcagctcctgctatcatgggaatattttctcaaagtcgttagactacagacagattaaagggctgaacaaagggctgggtgggtaaagtgttcactgagcaagtatgaggacctaagcaatccccaagacccatgtctatatcattagtagtgtttctttacagactgaccattgatcaaggttataggtaagtaaagcaatgtatttaaccttaaattatgaactatataattttatgttaatatcagacacttctgtaaaacctgaggtcttataaggttataaatcatgaggaaataagagtaatttgcttaatgtattatcaattactataaaaaaaaagctaaaaatattttaccatggttgtctcttaggagagtaactagccccatatcttcgaaaggctgaaataatgtaaaagtcctaaagccctggtctgacttaacatgcaggtgtgtggtggagtcaggcccctgggtgggcaactttagggagatccacttgcaatgtggtgatccaaagactactactcaccacgccacacagctactagtagctacccagtttgcatcatgagctgtgtggtactcatttacatcacattacaggatgatttcaattttttttgcctattaaataatcagcagccattcaatatgcaaaagtaattctctaaatgacactatcgccaatgtctgtgtttcccattttgttaaagcacaacccagcaaaactgatcaaacagcaaccacaatcactgccttcaaaaccccagaattacagatctcagccaggttcctgatggaaaacaaaacaacacaacaacaacaacaacaacaaaaaaaaaaaaaccaaaataatgagaaagaaactaaaataacgagttaggatgactggtagcctgaggtctgtttgagaggtctgcatgggtccaggattccagcccttgactcatcccacgcccaattccacatatgtgaggcagatggcccaaggatcatgtcttaggaacattatccaagggcctgaacatcagttttccttggcctgccatcagtcagactgtcttcaacagtagccacatgtgtaattatctaaaagtaaaaaggactaaatttaataccatattctaatataatataaccagatattactactccaatatataagtgaaatctcatgaggtattttgtattcttttctcatattaagtcttagaacgtagtgttctctgcacttggagcacatcttgtctgtatgagccacactccaaacgctccctgggacatgtgaccaatgactgtggtgtaagacaaggcaagtctggagtaaagaatgatggattaccaggctgcctgcagcggagttacaggagcttgggcagtttaattaatcccttgctgcctcaccttcctcttcagcaggatgaagctaataactgtatctgcctcacagaactgtgatagttgtgtgaagcgctgaggaccatgactaagcactttacaataaccaacctgcaaaaacaacattctcatcacactttgcctaccctatcatgttaaccacatgccttcctatatagttatgctgccagaggtgacttctttgggggtcacattaatccttcatgaagtctgattgcagattttatatctgggatcaaaataatctttttaaacaaaatttccatggaacattgtaacattaataaattctatttcaattagtgaggcaaagtaactgaaaagtactgatccctagctttagttgttattaagaaataatgaatccaagcacaagtggcagacttcatccctggcaatcaggttgagagtacatggctggctgcgatcgaagaacctttatatttcacatacaacgtctactccaacattcaataacaagacatgcctcgacactgacagaagaccctttgccaatacaaagtcagcttgctgtctcaatcgcttgtaactaaacggtcttcttgaaagggctaaggaaaaaataatcataaaggccacagagcccccaaacagcatactactctgaaggaaaaaacttgttatcgttcaaaccttcttttttatcaacagtggataaacacaataaaggcagattaatagcagcaagcactgcctactggagacagcttaagatcacaatgacaatgcttctcaaactgagtcatatccagatgctgtacctaaagaagtcattctatcaggacatttctataaggaaacatcccaaaggcacacgtgtcagtgggctttcccacctgccttgctgtacagcctaatgacaaaataacattctaggaaagatgagatgtatgtactttgtcttgaatctttaatctctgtttttattcctcaaaccccaccttgtgtttgtctatcttgtgtgtgtatgtgtggggtgtgtgtgtgtgtgtgtgtgtgtgtgtgtgtgtgtgtgtgtgtgtgtgtgtgtgtgtgttgtagtctaggcaggacttaaatttattatgtagcccatgctggccttgaactcacaacctcctgcttctgcctcccaaatgctgtgatgaaaggcatgggccctccacacctagcctcccacatctgttctgaggcatgaatttcctttaaattttattctctcctattctaaataaaatttttcttaaaattcacaggttattgaggttttcattaggaggtgaagttgagtctttcaagaagtttgtcaacttaaaatattttgtgtatgttggttgttacaattacccttcgtttgtttcataccacatcttgaatcataacttctctttaaagaaaaagaagctgctctcctaccaacttacatggcatggagagaaataaatgggagcaagaggttctaagtaagacacatcaaagtgacaacatctgcactgactaccaacctgacagactgctaacctgactaccaacctgacagactgccaacataactgactgccaacctggctgactgccaacctgacagactgctaacctgacagacggctaacctgactgactgccagccaacctgactgactgactaccaacctgactgactgctaagcttacctttgaacctactgttttaatactaatcactactcattactctgaaccgtctagaatcaggaacaataccaggaaggcaggcaagcactaccacaccgggtggtggtttcactcttatccagttaaactttttgcctcatcaaataaaaccaatgactttcagatgtaagatgcaacaattccctcctaggaaggtcgttttccccaagcgtatcaccccactccaaatactgttctctgactgctaaaggaaactttcaaaccacagggaaaacatactcctcccccaacacaaacgtcttatttagggttatttccaatgaatgaatccttctgccaacaaaggccttctgcttcctatggctttatttaattccccaaataccttattctaacttacttttgaacagtctgtacctctaaatggacagcatatttttcttcatttaacgagaacctgaagctagaaaggaaattgaattcagtaagtggacaattaatttgacagttatttgtattagtgtgccaagaactaaatgttagaaaaggggaaatttaatttttatagtctaagatcttaatatgaaactaaattcatttccatcttcatgtattgcttttataagaagaaacttctacaacctatgatttgcaatttattcacagggttcaaaagccttcagtgggtccttcagctcagagaaggtgagcaccaccgggcaggacaaagtcaattacaaagaataaagaagcattttaatgttctgtgcctcagaatcttagcctttttctatttgtaaggacatgcaaaatgggagataaacgtcaatttggcaacctaaaataaggatgacatcctgtgctcgacagctgaattaatttctttcaaaccatcagtgtgtctccaatgtccttatccgtcatagaattctaatgccacctcccattctcaaacacatgatgcccccatatcataaagaacacgcatgcagaaaacaaatcagaagtgacagaactggaactaccacacagcagaaatagagcatggagcattttcctggctcagataagcatcatctaaagttcacaaaaataagcatgttccttttgtccaagtccctgcgacatctttaggcttagttttataaaaatgaacaaacagatgatctataggcataaagaaacttcatatgttccactctccttttgtttctatgaacggatatatttataatgctatagagcagtactttatacaatcattttattattaaaacattttatatactcctgcacagaaatcactcaaaacaatgggttgtaacttaaaagtccattgagttgatatgtaagccagaatgtattttttctgtagaaaattgtgcttcccaaactagtaaaatagtaatcaaataatagctaaaatgtgattttataagaaaggtttagattctgggacccagaagaaatactagcttcgtttactgagtcatatttttgttaagttaaatcatataaatgaaattagtattaatctaccttctcactcttatcagttctcattaggctaatccttaatcctcatctaggttttagcagttcctcactaatggcagtgactacatcctttaaatttgctcagtgaggtgtctgttcctacattaatcatgaaatattttggttttgggcaaaaccataatctaaattaaatccacaaggtgtacgtggactagcattaaacactttactcttctgtggctttatgagaagccagaggaacaggaatggtgaacgccaacacacaaatcaggaatgggattaggctctagagcttaagttcaaacaggtcccccagcagtcaggttactgtgtaagaggtgccactgcgctttctatttacggtggttttcacatgggttagcacccaaggcaagtaacacactttatacactagaacttaccactaatttgtttaaccttttaccctagtaccctccctctgctttcacacgtgtctcattatccacctcaaaagcggcccctgcacctcgggattttttttttttttctcgcttcctgccctctataggtatcactccaacttaaatatggaaagccaaatcttcaaagataggatccacacatgagcgggaggtgtttgtcttttggggcctgtctatttgggccagtgcattgtccattcttaatttcattttcctttggtgcggagaatcacacttctgtcacccactttccaggtggtgggcatcgaggctgactgccttttccatgagaacggatgtgcacatatgccagggtatacggtcctttcaacaaatgcccacaagtggtagagttgagtcatatgacagttctaatattagttttttgagaacccttcacactgatttccacagtggctgtaccaattatacctgcagtcaccaccagtgaataggggccccctttctccacactctcacaaacatttgctgtcttgaaaatagctattttgactataatgagaggatatctcaaaattgcttgaattttaatttccctgagggacagtgataatgaacacttttaaaatgtttattagcaatttatattacttcttttgaagactctgctcagatccattctgtgttttcatggaatttagctttctgagttctctgtatagctagcaaagatgtttttcctgttctgtaggctgcctctttattgacagtttcagttactttcgttgaatacaaaattttaatttcatgaggtctaattcaccaattactagccttatttcctgagcaaatggaatcctatttacaaagtccttgcctctgcacataccttatagagcatactctttcctcctggaagtttcagagttttgggtcttatgttgattttgtctagggtggtaattaaggattgagtttcattcttctacatataggcatccagtttccccaatatcatatgtgacgatgtgaccttttctccaatgtgtattttgtcaaacatcgggtagctggaagttactcatcccattctgttgatctgtgtgtttgtttctgagtcagtacaatgctgcttttagtactatgatcctgtaataattaaatcaagtatggcaacacctccatcattattctttactcagagatgcttcagctagccaggatgctttgtgcttccatatgaatcacatttttttttttaattttggcaaagaatggtacaggaattgtgatccaggttgcaatgaatctgcaggtccttttgttaagatggccactttaataatccacgagcatgggaggaggtcttatcagtgtcttcctttctttctccacagaggtcactcacttcgctggttatgtttgttgttgcttgttttgaggccactgtgatcagagctgtttccttctcagtacatttgttatcggtatgaaggaaagctatttcttaaaacattaattttgtatcttgtggcctttgttcagtatttatcagctctaaaatttttctggtggagtctcaggagattcttatctgcagcaccacacacaatgcacacaagagggaacccaaactagcaatgctgagtgaggagcacgtgccaggatgaaatgtgacaaaggcagaaaaattaatgaaaccattctccacatattctagagacttcagttctgcaacttctttccttgtataaatcattctttatatttaaaataaatcctctaaacaccagccaaatcttgcattatagttatgggctttttgttcccagtgcacataaagaaaagctgtttgttttaacagtatcacttgagaaccagtaacagtttagttgcatagcaaagaaaaatacatacatgcctgtttatcattgttatttgcttcagagttagcatttctgaagtgaggacatcatctagcttacgtatatattgtattgtactcttcaagttgctaaaaataaatagtgctctgccttgcacaccctccacaaagagtctgtgaggtggcaggtgtgctaagttgattgtaatcatcatttttacatgtaaatcagatatcaaatttcacactgtacaccgtctttaatacacagaatttctgccaattacattcaataaatttagcatgaaagaagaactcccagtcaggggaaatgccaaccctccccaagtgaacataagcaatataatctcatcaaaaattctgatgtgaatttggctttttaataaattctaaagctcaactggagtgtgtgtgtgtgtaagactatccaacaacattcctgagagagaagtaacttggcagagacaatctacggcacattaaaatggacaacaatcaatacatacatcaatggaaagcaaggggtccagaataaaagcaagtagcaagtgtggctgcccctacaggacctgtctaagatcaagccaacaacactgcagcccgggtgggaaagacgctcacagggcctcaccccagggagacctactggcagctggctactgggggaggaaaatcagtttcctttggggtgcagtttctgtagctacccatgatccagtgggtggccctaaaaccatgtgcatatgggctgctctaattggactcagtgggttataaagaagaagaaaaaaagacataaaattgggagagagacatggggagatctgggagaagttggttgggagatggatgagataaaaatatatttatatatgcatgatgttctcaaaaacagataaaataaaaaatcttaaaatctaaatccttccccatcaataaagctaaagacaaatgaaaaatgagtataaatatgtacaaaatataaggataatatatgagcttttattaaacagccctacaggtcaagcccatgctagtgaaacccacagaaacagctgacctgaacaagagggagctgttggcccccagactgatcacagcatgggactgatccagaccccacaaatgtgggtgtcagtgaggaggcctcagaaatatatggggcctcttgtattagatcagcacttatccctagcatacgaatggacttcgggatcccatttcacctagagggatactccctcagcctagacacacggaagacagcctaggccctatcccaaaggatatgacagactctgaagacccccatggaaggcctcactctccctggggagcagagatggtattagatagggtgttagtggggagcaggggaggaggggagggagatagaatggggattgacatgtaaaacaatcttgtttttaatttaaattaaaaaattaattaaaaaaagaaactgagtctgaaaaaaataaaataaaacagccctatataacagctatataaaaaatccaataaaaaatagctcagacatgagagtaagagttgaaactatgaagcttctagaagaaaacatagaaactcttcagaacactgttgtgagtaaagatatttgggggtaggatcaaaaagtgctggcaacaaaagcaaaaaccaatccaaggggtaacagccaagaaataacagggtgatggcagcacacagactgtacaaaactcaagcaactcaataacaaaataacaacaactatgatctgattaaaacatggcatggatagacaaaatgcccaggaaatgaagaactgctcaacagcattaactgtcagaaagtcaaaaccacaataagatgagttatgaaacagcaagaacaaaagaccagcaaggatgtggagaaacactcttggtgtgactataaattaaatcagtccaaattagtctagctatcagagaaaatagcatagaattctttacaactctagatacaggattgatataagcctacattcttattatagggatacagaacaaaggaaatcaacatgttgaataaatacactcctgtgttgattgtagcattggtcaaaatagccaagacaaggaattaagcctggagatctattgataggtcagtgaagaaagtgtagtatgcatatacatgatggaatattatttggctattaaaaatgaacttctctcatttacaacacagatgaaacagaacggaaataacgttaaatgaattaaatcaattcacacaaatacaatacacaaatacaagaccgtatgttgtcactcatatgtggaagctaaaacgtttaagtagtcatagtggttcatgtctataatctcagcatgtggggtgtgagggctgaggcagatcttgagtttaaagccagcctgggagcactccaagccagcctgagccaaacatctagaccctgtctcaaaacaaacaataacatttacttcataaaaagagagagactagaagagtggttggcagagggtagtaaaggggtgtggacagtggcagggggcttggagagcgggtgtgacaatggtgacgggttagggagaaaagacagttaatgatatagaggaggtacggatgaatggacaggaagagtgaataacgttctaccacacagcacagtaactataggtgacattgtatgtttccagcgttgctagaagaatggattttatctgttcccaacttgaagaaatgataaatgtcctgaggcaatgggtacgccagtcatcccagtctgatcacgacacattcaaacatgcactaaaattccatgctgtaattgacaatatatatcccttggtatcagtaaaatattagggctatgatgataatacctttacctgctgagccttctccctgtcccagaattactgattttaagttaaagtacaattaaaaacaacactttggattataagaaggagagtatcgttgggagtttactgggactactgttgaaactaattagaagaagcccaagagtggaagcaggaaggaagtctgttagcagatggacaccatggcccagaggctgagagatggtggtttggaccaggacagtggcagtgggacacagatgtgcttctctgctctacctttcctttttctcactccaagtctcatgtccttcacagtcaagctccctgcaacaaccagcgttaccacccagttttcaatttgtattgaaatacaaattgaatattttactgataccaagggatacatattgtaaacaccagcaccctacagacatacttctagccactatgccactcaaacagtgccacggtcccagccaccccatcttccccagaccaccgagcgctttctcggccttacctggcctctgctgagcaaccttcacctgcattaaatcctctctcccctcagcttctgaaagatttccatcacctggcgctcctctctctgctactccctttccatcttctcaaggaccttcacaaggctcccgaacttgagtctctctccaaggttacctcttctgtacccagttcaccatacgaaatcccatagactgaaaccacacttccgctgggaactcccaaattaatacccctgactctggatgccctaccaagttttggacctctgtctactgtgtaacttcacctgctcatttggacaaaccaaacccaagcatttcagatatgaaaggttagaatgtcttccttctctgtcaacacacacgcctgtcaagccaaagactcctgccgtctctcaccagctacaacctctatcaccagaccctctcaaggttgtgtatctagacccctcctccttaatacctatttccccttgaatcctgacaaggctatgatgaagttcgcagaactttttatttggattaagcttctcaatcgattcccctgcttcccggctctcctcactgctgccacagtacattacaggtcttcaacaagttctgtaaatcagatcaaatgcaactctgacaacttcattcctctgacagaactcctttgctggtactgtagcctccctcatctctctgctcttccccgcacaccctcctctccatcagtcagctctttccagttctttaaacgccagagctgttcacaccaccctcttctctagcttcaacttcacagggaggcctacatagccttactgtaaaggagcacctccctgcggctggagagatggccccgggggttaaaggcacttgctgttctctctaccagagaatctgagtttggttcccagcacccacttcaggctgctcacaagcacaggtaaccccagctccaggggccctgacaccctcagctggcctgtcagggcaccctcactcctgttcaggcagacatacaggcagatgttaccaatgagtcacaggtctcacaggacataagctatcaaccttacgtggcccgtagcaccagtgattggtacagaatattcattcctaatttggcatttttcaaacatttattttttcaggcagacccacgctggccttgaatgtgaggccaaatcttcctagtaccctgtgatagcttccaatttctgaaagggagagtttggtttggtttttgttgtgattattgggtcttccttgtaccactatcctgctataggagagagtaacaacactatgctacaaagaaaaatgtctttcatatcaaaaataagaaagcagcacacgacacgctctttcaaaaggagaaaggaaggagcctgtaacaaatcctaaggaaatacacagcatctaataacccagccctgggttttatagcgctgaagaagggtttgatggtaaaaacaggcggaaggctcctctgctcaataaacgccaattaactttttcttggccaggtcgctgcaatttcagctcctaccgaggactctccttcacttcctacgcggctacttggcttatttgggagtttactcactacctcgaaagcccctcgcctgctagtttattccgtaaatctggatgacggacaggagatggaagaacagagagggtggggaagctaaacacttctgggaggggtgcagcaaaggcccccgtcccggggatggggatggggatggggatggggccgagccgcgcgtggaggactgacatcgggcagggactacctggggcggaggacgcgaccccggggcaggaggtgtgcaggggggaggcacggagcaggcactgggaaggagggggtggggagcggcaggacgctaggctagacgccacggctgaggctgagcgctcggggaggctcccagccgcgtccgctcgctcgctcgctgctcgctcgcacttactcgggtccctcctcagggcgccgggggtctcctcccgcagctgcgggaacaggaagtcgcgcgccgactgcaggtcctggaaggagcagaactggacgatggagcaggccatggctgcagggaccccgctcgcgggctgtcgttccccagacacgcccggcccggcccggcccactctaccccgcggctgacagcaccgagccccgaaagcctcagccacccggggggcggggacgccaggccggaagctgtcagcacgccccgagaggcgggcccggggcctgcgcgtgcgcgggacgctccggagctgcgcgtgcgcggggcggcccggcgcggaggggaggaggcgccgctcccggcgtgtgactcgcagccgtgcggctgggagtccgacgtggcggtcggcgccgctcttggcgagcctccaggggtgacctaattggactcggcgtgggcctttgagtcaccccgcaggcttgttgcgcttctgcggacagggcggctcaagctgggtttgtcaggtacccgggaaagtgtcggtgacttgagaattccgtgttttccctttaatgtggaaggctgttgtcagcatgcagtatacacttgtgccccccactccccccaccccccaaaagaagaaggtgtggggagtctgccttgcccaggcctgtgatcctcgctccttggctcaggcgctgagctcggcaggtggatttccgggtgttcctgggggcagcgcctcagacagcgaggctttgcaaagaaagcagctcccgtagattgccacggcaccgagaaagcccagtggagtaataatacacgagctgcgctgtattagagtcccctgggttagtcatttgggttttcattcgttcttcagtcactcaacaaataagtagtgttttctgtgtcagcggcactctgggcgctgagcttcagaaggaaaaaaaggtgggcgcgggacgggggacggggaacatgctcccacggaactaagaagctggcggctgacacagaccaagtgaagcagttactctgctaactaaagtggagagaatgctaggcgggaaagaagtaggaaacaccacgggacaggggccggcctggtgacttcttcctttggttttggactaggaaagcaccaacattatagactcctggaggactgggggtccctttaaccctttatatgtcaggtctctagccgtgatccgccacagagttgactccttaatacatacttgctagaaggagtgcacataaattaaatagaccaacctgattctttcacgtggattggagagtcctttcccctttgttgcctaactggaccgtcacaaatgacatctgaaaagggccttgtttctctctttgtttgagaatcattctaactatgtagtccaggttcgcctcaaacctgcaattcccctccatgtccaatctctgagatcacgtgtgtctactacaccatgcctgttttagaaagtatgtcttatcttaattttttaagtaaagaaattgctctaaatgtctgtgagaaggctcttgaagcccgttgaagttattttctaaggtgcataaaagcaaaaagattattgcattactgttagcactaaggcccgtaggtactcatttcccaaaggaaacttaggtgcaatccactttttatgaggcggacagtattacaggaataagtttaggacaaataatagatgggacatggagcactggtttctgatagtcccattacacaaatttagtcccaacaatgatgcaattctgagtatctcggttgttactcttaattcctgctcctaaactgggacaacttttaccagataagacagtttctatattatcaggttgcagacattagttttccacctataggatgcagttgaagtgggtatacacaaagtcatttccagcatcagggacttttaattctgaggtcacaaactgcaggaaaggcagtgacctgccagggtagtccttcaagggacagtcttttaacagcatgttgggctggacaggtgactgagcagttaagagagcttgatgctcttgcaggggtctggggttggattgccagtacccctgtgtggctcacagtcctctgtaactcacctaggtgatccctccaccctctgctggctcttcaggggccagacatgtatgtggtatacatgcattgtacgcatacatttggataaaacactcataaacacagagtaaaaataaacaaatactcctttttgaaagcctacaaggcttcctcagaacatcgctcagtaaatgttctgataatcagttctgataaggttttccctaaaatccagcaactgtgccaaactaaaataaaatttaaatttggatctgtagctttactgattaatacagaacgtttgccatttcatggaaaattacaatgccagggtttgaaacgcattcaagttcctcttcgggtaaatgcattttgtggaagtagctgcacttggctggctcagctggcttttgttctgtcctgaggcattcatatagctcctctgtggcactcactgaatttcattaccaccttggctcggtctcagagtgaagttctctgacttccttccaagtggtgttgaaaagcttcattcatgactgctttgaggaacttcagaaacccttcacaggaattacaacaggcccaggcactgagcgcttccctgcttgcagcagtgcctccgctgcttctgtggagtgtctgggagtgccgctaaccacaccgtgtggggaaatgggcaggtcttagatagccccgtatagacatggctgatactgagaggcagaaagacaaataaacaacaacaaaaacaatcaattctctgactcatttaacaacaggctggtggcaagggctactgtaaccattctccgatgtccatcaccaggagtcacagcaccaagggctgtagttaggacagagtggccaaggaaactggttaacagcaggtctttaccaacccttagtggcagcctgaggacaaaggactcaagctgtaggatttgaagcaaatggggttagaaaagcaatggacttttagccaggagacctactgtctgtcttagttttatcattaattagttagtctgtcttagtttaattgttagttttatgaacaaggctgttgtgatggaatattattttaagatgtgttaattctgtttatgagttggaatatttgtttattgatggaaaggtatgttacattcttttatgttgcatttgtttaactctgtgaagctgtgttactttgcctgcctaaatcacctcattggcctaataaagagctgagaggaataggtggggctgtgaggcagagagaataaacagaaggagagaggggggagtgaaaaaaggagaagggaaggcagacaccaggagccagccacccagacatacagtcaaaaagccagcaatggagtaagatgtaaagaaagacatatagagtagagaacggtaaaagcccagaggcagaaggtagatgggataattcaagttaaggaaagctggttagaaacaagccaagctaagaccaggcattcataggtgagaataactctctgtgtatttgggagcagggtggtgggcccccaaagagtaagaaaaaaaataacaacagcacaaggcaatacatgccacctttctgggccctcttttcttcctttctcttttaaattctatgtgtgggtgttgcctgcatatatgtaagggctccacatgtgtgaggtattcagggaagccagaagaaggcatgagatctcctgtaacagaagctacaaatggttgttagccacccagtgggtgctgggaactgaacgcaggccacaagagcaggaagtattcttaatcactgatctatctctccagacccaggggccttatttctttatctataaaatcaaggggctgagaacttgggtcaatcctgggaatatgtaggtttagagaagagaccagaaagagagtcgaagctgctccagagctaccccagcaagaggacagtggctgtattcctgactatcctgttgctatgacaaaataccatgaccagaagcaatttaaggggagggggttaggccccagcccccacggggtttctgtgagttgcctgtcagccacaggtgcatcctgttttctagtcctggcttacagccccgccttgcccccctggcatcaaaaaatatgagctcttagacttggggcttctccactgtgctgtaagtctgtatataaggctgctccctccctaaaataaagcagagatgcacatggcacaactgaccagacatcttgtcattcattttaaatctccaggctttcgcctgatacgttagacttgctggtggtgagaagtttacttattttgccaagggagagtccataaggatgggggaggcatgacaacaggcagacagagcagagaaagtggagagatcgagtcttcaaccatgaatttgaagcagagagtgaaatagaagggggtgaggctctaaatcctcaaagcccacactcaacgatgaatttcttccagctaggctctgcctcctaaatgtcccatgacctcccccaacagcaccaccaactggggagtaagtgttcaaataccatagactaccagggacactttaattcaaaccaccagaggtggcccagcaagaagcatgatggacagggtggccatggagactctgagcctcccaaggtaaaagagttaccgaaggcttacctcctgacttcgctgaggggcatttttgaagactgaagagaagcagggaatttcagcaacatcttttgattcagctaacatctgtggatggcttattactttgtaagtgcaatagtgatcacagaggggggagtaaaccaagctctgccaagactccatccctgaaaaacagatgtacacaaatagctgacaagaagccgagtgtggtgggtgcgttcctgtggtggccaagcttggttgtcaacttgtcgaatctagaaagggaatctcaactgagaaattgcctctgacagactggcctgtgggcatgtgagtggagcattttcttggtttgcgaattggtgtacaagggcccagtccaccgagggtggtaccacatcccttggcaggtgggactgagatgtttaagtaacttagctaggcaagccagaggaagcagaccaggaagcagtttctcagtggtttctgcttcagcttttgcctcattccactccaagttcctgcgctggctttctctcagtgatggactattgttgcagggatatttgatcataccgtgaccctgaaattgcattatttaaataagatcaaccatacgtcaaaaggcagagcaagtaaccagttgactggaagtaacatagagagtgaggggaagtcaggaggtgtgtgtgtgtgtgtgtgtgtgtgtgtgtgtgtgtgtgtgtgtgtgtgtaaacatatatatatgtattatatacatatatgtatatgtatatataatcatctgtttctcttctgtgggctggtacaactcacctcttcttataacaccagcttcaggagaatctgatgtccttttctggtctccccaggcaccatcatattcatacacatgagtaaaacacacgcgtgcgtgtgctcgagcagttaaaaatcaaaaatgtttttgaaaaagaaaacaaaatgtgactggtaagatggttcagcagataagagcactagttgctcttgcaaaggacctgggttctaaaggacctgggttctgttcccagcacccactcacaaccatctataactccagttccagaagtgtgcaggattgtgactaagttctggccaatgagatggcgcacaaagctgtggaaggcagggatctccagggagctggcaggggtctccagaagaacagacagctcagggaaactgatctctccttcacctttcctgtttcctacctagaatttgacatagctacaacttcagcatccattcatgggtttgtgagactgcattaattacatataacaatgtattacattgagggatttccacacacgcatagaatgtattttgannnnnnnnnnnnnnnnnnnnnnnnnnnnnnnnnnnnnnnnnnnnnnnnnnnnnnnnnnnnnnnnnnnnnnnnnnnnnnnnnnnnnnnnnnnnnnnnnnnnnnnnnnnnnnnnnnnnnnnnnnnnnnnnnnnnnnnnnnnnnnnnnnnnnnnnnnnnnnnnnnnnnnnnnnnnnnnnnnnnnnnnnnnnnnnnnnnnnnnnnnnnnnnnnnnnnnnnnnnnnnnnnnnnnnnnnnnnnnnnnnnnnnnnnnnnnnnnnnnnnnnnnnnnnnnnnnnnnnnnnnnnnnnnnnnnnnnnnnnnnnnnnnnnnnnnnnnnnnnnnnnnnnnnnnnnnnnnnnnnnnnnnnnnnnnnnnnnnnnnnnnnnnnnnnnnnnnnnnnnnnnnnnnnnnnnnnnnnnnnnnnnnnnnnnnnnnnnnnnnnnnnnnnnnnnnnnnnnnnnnnnnnnnnnnnnnnnnnnnnnnnnnnnnnnnnnnnnnnnnnnnnnnnnnnnnnnnnnnnnnnnnnnnnnnnnnnnnnnnnnnnnnnnnnnnnnnnnnnnnnnnnnnnnnnnnnnnnnnnnnnnnnnnnnnnnnnnnnnnnnnnnnnnnnnnnnnnnnnnnnnnnnnnnnnnnnnnnnnnnnnnnnnnnnnnnnnnnnnnnnnnnnnnnnnnnnnnnnnnnnnnnnnnnnnnnnnnnnnnnnnnnnnnnnnnnnnnnnnnnnnnnnnnnnnnnnnnnnnnnnnnnnnnnnnnnnnnnnnnnnnnnnnnnnnnnnnnnnnnnnnnnnnnnnnnnnnnnnnnnnnnnnnnnnnnnnnnnnnnnnnnnnnnnnnnnnnnnnnnnnnnnnnnnnnnnnnnnnnnnnnnnnnnnnnnnnnnnnnnnnnnnnnnnnnnnnnnnnnnnnnnnnnnnnnnnnnnnnnnnnnnnnnnnnnnnnnnnnnnnnnnnnnnnnnnnnnnnnnnnnnnnnnnnnnnnnnnnnnnnnnnnnnnnnnnnnnnnnnnnnnnnnnnnnnnnnnnnnnnnnnnnnnnnnnnnnnnnnnnnnnnnnnnnnnnnnnnnnnnnnnnnnnnnnnnnnnnnnnnnnnnnnnnnnnnnnnnnnnnnnnnnnnnnnnnnnnnnnnnnnnnnnnnnnnnnnnnnnnnnnnnnnnnnnnnnnnnnnnnnnnnnnnnnnnnnnnnnnnnnnnnnnnnnnnnnnnnnnnnnnnnnnnnnnnnnnnnnnnnnnnnnnnnnnnnnnnnnnnnnnnnnnnnnnnnnnnnnnnnnnnnnnnnnnnnnnnnnnnnnnnnnnnnnnnnnnnnnnnnnnnnnnnnnnnnnnnnnnnnnnnnnnnnnnnnnnnnnnnnnnnnnnnnnnnnnnnnnnnnnnnnnnnnnnnnnnnnnnnnnnnnnnnnnnnnnnnnnnnnnnnnnnnnnnnnnnnnnnnnnnnnnnnnnnnnnnnnnnnnnnnnnnnnnnnnnnnntgagtgtcccatgagttgcttacaggaacatgtatttaaacaacaaagcaacttgaactagggtgaatcattactacaggacattgaatctctcctgtgtggcagagctattgtcaaatgcttggatgaccacatctggatttttttacaggtgacaaaatagatctccacacatttcagcctccgctatttggaatttcctgttattgtgactgaatctaatcttgacatgctatgacccaaataaagagaaaattttccataaatctcagctaaaccaaagaattttatttcacaaatatccccccccccccagcataactcagaaaaggttaggtgaattacttggatgttttcaattgttttaagtaatttggtctcgttggaacatgaagacaagtcccagatatccaagtatttcttgttttcttatttttggttgaccctaaacagatccataaaagattcttttaattaaaataatgcctccagtgttgggtggctggatggtaagttctagctaacaatttctgaaatgagagagaaggaggagaaaattcaggaaggagttgtgctttaacatgggacttcaagtccagaaaacaaaaccaaccaaacaaacaaaccatcgcattgtgggttgtgagtgaaggcagtaagccgatcatggcacttgtatgggtgccccatttttcactatccatttgtctgttgaagggcgttcaggttgtttccattcccggctattgtgaacagagcagtaatgaatgttgctgagcaagtatctgtgggctaggatgcccagtcatgtgggtgtatgctaagggatggcagagctgggtcatctgatcaatttagcttttcatttttgtggattctccattctgattttcacagaggctgcatcagtttgcatttcctaaacatggaatgaaagtccttctttctccacagccacaccagcattcattgtctgttgtgtcattgatcttagtcattccggctggggtgtgacgaaatctcacagttgttttcatttacacttccctaacttcaagggacaataaacacttcttgaggtatttcttacctttttatttcttccatggagaactatttagatccctaagccatttttcaatgagttatttgcttcctagccccccccccttttctagtttttgtatattctagatattagtcctctgtcagatgtatacctagcaaatattctctcccattctgtgggttttttcttcacttgattgtttccttagctgtaaaaaactgttttggttttatgagatcccagttatcaattgttggccttcttaattccttggcaagtggaatccctttcagaagccactcctacacttatgtcatgtaggtactgccgtgttttcttctagtagttttagtgtttcaggtttccagttgaggcctttgatccacttggatctaatttttgtaaagggtgataagtatgggtctaattttattcttctgagtgtgggcatccatttcgtaagcactgtttgttgaatatgctgtcgtttgtccagcgtgtttttgcactgtgtcgaatgtctgatggctgtaattatgaggactcatgcttgggtcttctatttaattcttttggtccacacatctgtgccagttccatactatttttattactttagttccctagtaaatcttgaagccaggaatagcaatgtcttcattattattcaagactgctttgaggtatcttctgggcacccaaactcacatgcacatacctgcacacagacgcatacacataattaataaaataaatattttcatctttgaagacattgttttaaaaagctgcttttaaaagtccctgtgttcattgggcagaagcaggtgatcctctgtgagttctgggctagtctgttctacatagcaagttccaagatacccagggctaaagtacagtgagatcccgtcaaaacaaaatgaaataaaccaaaccataaacaaggtcacctagcagggcaggaaaattttgtcaggttaaaaagagagagagagagagaaagcgtggtcttttaagctaatcttagctggcttgtgagacagaatgggacagaagacgcatcgtgacctaaagctggtggcacaacagcaactgtctgtgcaaaggaagcagctatttctagattgtgaagtgtgatgctgtgggcggggtaagcccggaatggtggcctcatttcctccagaaatttaggactaattaggattgcttagcttgcttaaaggtgagaagtgtctccttttatatttcttccactttcttcaagccacttttaacatcttgattgcagtcaacaactgcaggaagggaccaggttttgcaggtctcagacaggtggtgctatattctgccccggggtctctgatcttcaatgatcacatttgtgttgaatttctacttcggttcctccttgctaaggctttcacagttaaatggattccaaggctgatggtgttgcgctcagtgtgttcttccaagaatccccaccctggccttccaatctctcctcatactgaccaacatccaataagcaggtgtttttgtctttcttgattcagtctctttccaatggatggagccaatgacaactgtcctgctagtagttaccaacacagtgcgactttgcatttaaaacttttgactttactgaacacattatctggctcattttcctatctttcttgtgacaaaacggaaaaggtccttggaagacataaaccagcaagtctgcaagccagaacggaagcagggacttcctaaagtaatttctgaccatctattaggtctttgtttttcccacaccaagagagactcaggactcggcacatgtgtgggacctcagtgcgcatgctcagttttccctttaaaagttcctcctcccctccctcctctcctctcctcctctctcttattctgtgtctctcttctctcttactctctgtcctgctctgttcttccatttctctctctctcactctcccgccttataataaactggttaatgtactctccatggctcatgttccacagagcgtgtctttaagcaaaagaataacaccaagtatcaagaaatctttcaaaagcaagctcaaatttttaaaccttttgaaaagtatgatttcccaggcaaaatgagtcagcttggttctttatagctttaaaatctatgagtctttgaaaatgtatcaacttctctttaggtttgtctgcatttctgtctccccactagatggtgatgttctcaagggcaggagtgatgacctgtttgcttctgtgaagttcattcactttatacattaaaagcaaaatcaaaccaagctactaggcacctggacattataactaacaacatgactcattcccagaatgcacacgcacacatacccactggcgggggtggggggtggggggcaatcagatagtcagaaaatactcaatcttagctatgttttaggcctggggctgtagcctagttggtacatcgtgctttcctagaatataggaaaccctcagctcaactccgggaatcacttaaagtggcgtggaggtggtggtgcacacctttaacccgagcactctgggaggtagaggcaggtagatctctgagtttgaggtcagctggtcttcaaaacaagttccagggcagccagagctgtttcacaggtttctctggaaaaaccaaaccaaaacagagcacacctgtcatctgagcactctggagttggagtcaagagaatcagaaagaagttcaaggacatctttggctatatattgagtttgggacaaatgaggaatacagttttctttatattttattttattttgtttttttgagacaggatttctctgtggctttggaggctggcctggaactagctcttgtaaaacaggctggtctcaacgcacagagatcgtctgcctctgcctcctgagtgctgggtttaaaggcatgcgccaccaacgccctgcacacttttctttataaaagcaaccaacaccttataaatttcaggcaatagttaactgaaaaaaaaaaatgtaggtgctggtgagaggcctcagtgagtaaagatgcttgcccccaagcctgacaacctgaactgaatccccaggacccacatggtggaaggagccataggagtgtgggggaggggagaggctgggggagaatgcctagggacaaattatatccttcaaaatcacaccctctgtcatgtcctattttccatattcaggaaccttttcttacagtttctactgcctccaggtgttaccatcagctggggaccaagctttcaacacaggaacctttgggggcattccagatgcaaactataactggctccttacagtcaggaattaaagcttaaattacagcactgtgtttttagtggttgctatggtttattattttagtgtccccagcacagcagtgtccagaggctggcctttgggaagtggtggggtcctgagggctctgtaacatcacagattagtccactgatggattgataacacaacactgctgggagtggtggaaacaatgggaggtgtggcctagttggaggaagtgggtctttgaagcatggcctcaaatttgttttgtcttcagctcctttctaggagccatgactcctggctttatgtgttttcttagcacacagctttcacccgtgttttcaataacctttacctgctaccgccattcattttaatgtaaaattgaccctgtcctggacaggattcagttcctggtccccttgtcagacccccaggaaactcaggtatctggggtcccaggccacgaccacggtcaccccaatcaccaggcggattcgagagcttgctgcaaactgcacaaggctttattgtaatttaacgagctaaccccatgttagctcgggtctttcacccatccaccatggcagatggctggcaaagacagctcctagggcctcccctagggcctcccgagagatcttatagggcagcgtaaggggagtgtctaggggtatgcacaggctcactattggtgtgcctccagccttgaagggtctgccctgtgttgattggtcaactggttgttatggcccatagaccctcccagggtggttgctatgctctgtgcgtcattgctgtgtgcttgtccgtaaagtacacccagggtcataaagcatagcgccaccagctaacttctgattggttccttgccatgaggcaggcatctgacttcctagtgaccaagacaaggtcatagaagcacgtgttcggccgctatgactgctgaaaggggagctggtcccttcaccctcactaagctttattcttagtgttaaacagctgtgattgacttagctacctgctattgaaagggaaaaaaatccaacctttgcattcaaagaatcactgctccggtgtcttgtataataactgttaacacagttgtttaaagttacacaaaatgagcacggctttcttttatgtgcagagatgagccatccgtactcctctttttgaaatcagagcaatcttaatgtttcatggctgtaactaattgaaccgtgacgtagcagttgctgccactcctcagcatcctgttttatttctctgttctgccccttctgccccacctcatctttgcacaccaatcatacataaacactttctgtttacctgacatgatgtaatatgtaggcttagtagagtttaggcgttctagctatgccaaattctctgaaataacctttttccctttggaagacaatagttgttgtaggttatgattgtaagcccaataaattggcaaaatctattttgggatttttttttcaaagaagttaaatttcaaaagtgctgagatgttaagtaatgaataaaataaaggaattaataattcattagtgtattaataaatatttcaggactaatggggccctggtaaattaacattaatatcttagtaagtgaaattcttttaatgttttctatatttcaatttaatgtgtttagtattgagcaagaatctatagataagaggtttaacaaaagtcactaatagatgtgaaaagagaactttgagaagttttcataaatgaaaatattcacatgtaagacatttaaaggcaaagataaccatcaatcacttcctaaccgtgagttcattttactaaacaggattattctcccttgaaatttactaagatgccttcagacactcattaagagagtcatggctattgtgatgaagttgtagtctctcattatatatccctgaaatgtcttcaaatgaacacttttaactcgtaattttattttagtattagccatgactttgggggattgtgtatgtgtgtgtgtacatgtgcgctctctctctctctctctctctctctctctctctctctctctctctctctccatacatacacacagatgcaccgccttttttgatcttttgaagtcttttaactatttattcagtgtgcatgcaccaataatgctcttctttctggatactgaaaaggtcaatggcactcaggccagttgtgaggaccaaaaccatctctaaaaattactaaatatccctccagagcagaaggtcaccttgtaagggccaccagctctatagtaatgttttctacaaggatcttaatcttaaagacctaaagtagaaaaatcccaagaaccaacaattcattcattcatttacttattcattgattgattgtcttgcttattcattcatttcaatgttgttgaagcatcagtcacagctcattcattcattagccacgccttcaaaatggtgcacacctttaatcccagcccttgggagacagaggcaggcagatctctgtgagttcaaggccaccctgatctacatagtgagttccaggacatccagggctacatggagaaaactggtctcaacataacaaaaaaagctctttggcttctaggatctcataaactcacccacttatacacacgcgcacacatacacacacacacacacacacacacacacacacagcacacagacacacatggaatacacacataaataaataaatatattttgtcctgctattttcttttttgctttattttgtttttgtctacttcacagaagctagttatctggaaagaggaaccacaattaagtaaatgcctccatctacattgtctgtcagcaagtctctggtgcattttcttgattaacaattgatgtgactgggcacaacccatggggacagtagtgccaccactgggcaggtggtcctgagttatataaaaaagcagatggtgcaagccatgaagagaagccagtaagcagcattgctccatggtctctgcttacgtttgcctccaggttcctgccttgagttcctaccctgacctccctcagtgatgggcagttatctggaagcgtaagatgaagtaaaccctttcctcctcaaattgttttttgtcgtggagttttatcacagtcatagaaacccaagacaatcttcaaagaaatgtgcaatgaagtttgcattctgattaaaattgaatgtctaaccttttgatatgtctctaaacatatttttatcctatactatgtatttaggtgtcccgacgtcaacctggggcaagagagtcaaggatagggaatggggacaagagacgcagaaagaacgaccacaagacaggattctgatcaagtggcaaactttacttttctcaggctagcttatatagtcaggatatggggaggggtagaatgggttgtttgtgcaccaggtgttagtataggcaggatattaggaagccacaaagaggattttggcagagtaaagagttcatgagtaagagctccaggaaggggttgcctaggtgactgagcctataggtggaggactgggtcaagctgtgtattttcttgagctgaggttctaaggagttgctatgtaaaggttaactatgtggcctgctaagcatggcctaggatctcatgccaagccctgagatttggctcccaacatttaggaaaatcagcattttcatcattattgattataaaaccaaatgcagccaacactgaagaatgttgaagatataggctggggagagagcttagctagtaaagtgtaggggacagaaagccatgcctgttagaggctggctacaggtgtgcctgaccacgcctgctaaggcgtggtcaaggtgaggtcagtatgacgaggcatgggctcttaaggggctgcagagcacatggaagccccttctcctgccccttctccctggcctcgctgttctgctgccctgggcacgctctggcttgcatttgactggtatttatctcaataaagatatctcgaccttacggattatgaattgtctgagtcacgtaataagtaaagtgctaactgtgcaagcagaagggtctgaggcaacactcagaccccatgttaaaaagtcaggcatagagtcaggcagtggtggcgcatgcctttaatcccagcacttgggaggcagaggcaggctgatctctgagttcaaggccagcctgctctacagagcaaattccaggacagccagggctaagcaaagaaaccctatccctaaaaaaacaacaatacatgttaccatgcctgactttttaggcagagataggcagatccctagaacccttggccagccagcatagcctacctggtgagttctaggctagtgagagaccctatgtggtggtttagtgagaaatgccctcctgggctcaggcgtttaaacacttggtcctcagttggtggtgctgttgggaaagttatggggaaatgtagtcttgctagaggaagcttgccacctgggggagcactttgagagttcatagccctgttctacttccagtgaaaataaacaaacacatacatctcattagtatgcaaatttgccttaatctttaatagatgataaaattacatgtttatcaaagagttgtttcaaagttttttttgttttgtttttgttttttttgagacagggtttctctgtgtagctttggagactgtcctggaactcactctgtagaccaggctggcctcaaataagagatccacctgcctctggctccccagtgctgggattaaaggcatgccaccaccactgggcacaacgtaaatttttaactttttgggagaatttattacatgagtactgtatgtacattatttctgccctgcctctctacctcctcctgtatctaccctctcaagtttatgactctttttctgtaattattaatgttacacacacacacacacacacacacacacacacacacgcatacaacttacagagcccacttactgttgctattatgtatgtgtttagggctgaccacttaggattggataacctcaggaggttcagacagagagaaaactgattttccctcttcaacacccattaccttgactacctgtagctgttcgtcatggatagggccttgtgaggtttccccagatttactggcattttgcctggtgttgtcattatgcaggtcttgtttaagtgaccatactatgaagattcatgggggcagcatctccgtcgtgtctagaagacactatttcacagcagacgttttggtctttggtctttacaatctttttatcttctcttccacagtcttccctgagccttaggtgttgggctgtactgttcaaatactgattggggctgggcaccccacaatcacttcttctcttttgaccagttgggcaactttgcagtagctccagataaaattctttgtgagttattatcagtagatgtttgatttgtatgcccattttatgccttttcggggcaggatcacgcgtaaaatctttagacgaaagggggtttcaaggagtaaaagttttataagctccggtctggacacaagctgtcttattcacaagagcacacactatcaactgtctgttcagaaagggttcactccctaaggtgcggtggctacgaaggccaccaggatgttacattctgcacacatccatccacgtcgtaactacacttgatttgcaacagcagccttctagggctacagctacaataggctccaagctctctcctttgtcccgcatagatcattgtaaggccatattgtcttactcctctgtgcatccccagatcatggcccatgataacaatttacatcatgtcttttaaaaacttaaagtagttgtcataatttgcttatccattactctgtttctgacctagtccgggactgaactggttcctcctagtactccgagaactcagctgccaagttcctccatattgaaatgttccctgctggagcggggaaggagccgtgagactcagggagttagctaaccttgcaaatcttggagactgaagagcgcaaggttcccaaggccttccccaatgtgatagaggcaataagaagtcattgaggaggagaccgacttgcctggaggaggggtgccaagctgtccagccattgacaggttagcagagagctccggggatatagctgtcatgtgttgccactggctgggtggtcattttagagagacagccattaagcagccattcaccaaaactcccacaaggaatcccagggaattcattacgtatcaagtttgcctttgccagaatcagctttggactgtcattgtttccctatctagggtgaagggacattcatgttgtctctccccggaaagccccacacaacatttgtttaaagatcacttccttaagcacagtttccttgatactatcaaggtgtgctttcgctgttaccatggtagttcagagagcaccttagctctctactttatggcaatgttcatttcttgatttttatgatctgaaatagccagcgaggcccaagagattgagaaacacaggttctctcatctttggtgcttcaatatagtacacctcagtacacatgcaataaacatttcgggaataaaagaattttgattaataacatttgtgagactgatctttccatttctctaatcctctactggctacacagtcacatcttggcaagtggctggtatatttttgttcccgaatacaactcttccgaaaggttgccatcactgggtatttctgtcacctactgtatggacatggtgtcttggtgaatcaaagtcagggtgtttgctgtatgtgcatgcactagagtgctctgcgatctctctctctctctctctctctctctctctctctctctctctgcttcttcagggactttggttgataaaacagtggcttcttccacccgccctccactgcccagaactgtcttttccagtttcggtaggaatgtgtcaggcaggttcttcagagttttctctccaggtaggaactcagacgttcttcagcattcttttcctaatttagatgaaccactagagggggcagtgacgctccctgttgtacctcaatcttaggatagtagggtcagacaggctttggggacctggggcagacttcttccatctgataaaccaaggaacagagtggaaacgggaaaaacttttcctaaggctacagagtcagctcttgctctcccccaacccccacaggattctacatggagcacactcatgctgcctcagggccttgaagggggtactacaggttaaacggacatggctcatgtgtcacaaggctgattaactcatcccgaattccctgggctgccagtgtgtttatctaagtgtattttttaatggtccatgggtggagcgtgtgtgagggagaggaaggagaagcatgtggtaatgaaggttgtgctgagcctcaacttttttggaaaatgagatgtggcggcctgtgatgactattgcctttttttcttaggtgttaacgtcctgtcacccctttgccagtaactacccccctcacttacagaggcatgggccggtggtgatgctggctaaccatagctcccccattcctccctgacagagtgatggcttaggggaggggatgaacttcaggtgggtcaatgagaggcctccttagggtctttgaactcctaatcctcctgcctccatctcccaatgctaggattacaagggtgtgccagcatgcttaccagagaagtcttacttaaaaggtatgtaagggagctctgaagagacccagagagacgacccaggcagaggacagagcccaggttccgctccatctgcccggagtctgccgcacctcttacagtctcctagttgccctgagttatgccacctaataacaagcttgtcagttctttcttttttattcttcaaagataatttgacccagatgcttgtcattcacagtgaagaattttgccataactctacaggttgttagaatttaccagaactaggtctgaaattgagtggatgggttggatggactgtcatcactgagaaggggtcgtttgaatgtcactggcctccataatctcatcgggaggggcagtattaggaggtgtggcttcgttggagtgggtgtggccttgttggaggaagtgtgtcactgtggggatgggttttaaggttttcctatgctcaggataatgcccagtgtctcaaccggcttcctgtggcctgcaagatatagaactttcagctactacgccagcaccgtgtcttcctgcacactgctatgttccctgccatgttgatagtggactgaacctctgaaactgtaagagcacctcaattaaatgttttcctttataatagagttgctgtgatcatggtgtctcttcacagcaatagaaaccctaactaagacaatctcccttctcactatgaccttttgggtaaagacaagactcggcctttcaagaacagtgattgaagaatgcagactgatcagctctctgtatttcctatcttcactcagccaggaaagacatggtaccagtgaggccaagggcagggatacatgatccagttacttctgctctctgtaacaaaagctttactctaaaactccaagctgttttgcagctcacctcttgagtggtgtgccagtatggctcatctaactactgggtagttagaagtgttgtgccaaactcagggaatagcattcaagtcccagctccgagctcttatagacagcgcctatgagccatcttatatctctggacctctacttatcagcttaaaaccatgatatttgaacaacctgatcgtaagatgttttctggccttaagattatattatcaccaaagaacaattcaataaatattttgagaatctcatgttggtctaactgatcctgtaaaccccgcccccaagtcacatttaacttactattcttttcacgagtgcctaaggcaagccagatgcagtaccattcaaatagaaatctctgcttctggcagggaagtgcagccctgccctccttagcaaatcatttgttaccctgaaggttgagtatacgccatggcagggagagccactgcctcttctgtaatattaattactgtgaagtagcaattctgtacttcggggcctgggaggaaagagctttcctcacattctcacctctgcctcccagactccctcgacacatccacctcccagactgcgaagagccagggttgctaggagacctgtcgacggtggaataaaaagggaagcagatacttcctggataccccatctagttttgaaagactgagttaaagtacaagtggaggtggttagagaagggaaggaaggggcgggaggggaagggaagggatgatacacacgagaaactgaagtcattcttgccaggcccaagtttgtctccaggaagcagtgagctaaactggtttgttctgagtgtcgaggggtaccagggagctcagcctaattggggtgtgggaatgatcagttagacaccaatgagacccgtgtaggacacaaagttaaggatactgtaagggatgcttgggaatgcagctcagtcggtagcatggatgaagacctgggttcaaggcctagcattgcataaaaactgagcatggcagtacacagctgtgaggcgagcactcagcaggtggaggcaggaggatcagttcaaggtcatcctcaggtgcatactgagttcaaggccagcggggctacgtaagaccctttctcaaccctacctctttcccaacaaggagagcattctaaagtgaggtgtacccagtgctctcaagtacctatctgttgctctggtaagacacccttagagaagcaatctaagaaggaagactttctatggattcatagtgccaggcaccatccatcatgacagggacgtcaaggctgcaggagttggagcagctggtatggtgacagttgtagccaggaagaagagcccaataaatggctgttctcagttcactttccccttgtggtgatttgaaagaaaatggcccccaaagggagtggcactattgggaggtgtggttttgttggagtaggtgtgaccttattggaggaagtgtgtctctgtggaggccagctttgagacctcatatatgctccagccatgcccagtgtctcagatcacttcctgttgcctgctcaagatgtgagaattctcagctccttcaacgccatgtctgcctgcacgccgccttgttctccaccatgatgataatagactgagcctccaaactataagttacctcaatgaaatgctctctttgtaagagttgccctggtcatggtgtctcttcacagcaacagaaaccctgacttcagcccagagatggttctgcccatagtgggctgggcttccttcccatctcaatttatctaattaagataattctactcaggcaagcctagataggttcagatcccaggtgattcaacatctcatcaagttgacagctgagaaaccatcacaactactgcatcatactatgtggggggtgttctggacatatttggcatacacacaaactccaataagtggttatcattattgtggttgttattgttttggttgtccttataggtacagattttgtttgtagttatttttaagtcactgtggattaaaaacacactttttaaaagacagggtctagttaagtagcctcaaactccagattctcctacctcagcttcctgacagctgaggttacaggcatgagccatcaaaacctactttacaatatgaatgtcttcaccgtagacttgtcatcttttagtgtacccctaaaggcatattgtcctattcctacacatgtctgaagcatacaccgagagtcagtttcctgcatccaacccataggcaccatgatctccagttgtcccataatccaaaccagataagctgaaatagctaaacagaacagaacatgtagcacccgcaaactacgcgtaacaggagagagccaccatccttccattcctgttcggaaagttccagctaagccgagtgtggtatgttcctgtccaagaagtcactgtgtttggtggggccgacaacctcccttgggtacctctgctatcctcattttgaccggtgacctggacaaagctgccttgcctgatgttactcagactagtcactcacagcagcagtttctgaggcagggggctggcagtaagttttatgttaggagaatcacatcctggaaagacataacatttccagacatgtggtggtcgggtcatgtgaggtctgggatcatctggagcagcgagcttccgggaatgctgcctccagcaactttgcctggcagacaccggaacacagctctttctggattcaggaaagaaaacaaagagagcagaacaaagagtgatgtgctagcttcaaagacctgaggggaaagagcttttgtaaaactacccacctcactctgccacagcagcactcaggctaattgataattcaaaggcctgggaaaggcctggggtgggggtcgggtgggggtggggtgggggtgggagtggggggtggggtggggtgggggtgtgggggtggggctttatctggtccaaacttctgcctcttgtgtagctcatttctgaaagttcagtgcacgggaagctcttcagaatgacgctcaaaaccctgctttggagcagcagctcagagccgtgacacctagagcactggactgcctctgaagcttcagctgaaccacaaatgcaaggtagccgtggagaaggggtctgtccttccagccggaactcctatgaactgtagtagggaaaggaagtgatagacaatgatagaatcttagaagtgcagattgtgccattgcttttcatgatgatgttcttgacccaaaattttaaagcttcttaaagatgtactcatatgtactcttcctgcaggctcataaagtaataacatgtttctgtatctgctttaatgttatctactgcatgaaaacatacttgcatctctttggataatacacattacatacacacgcattacatatatcctatatgtgcacacatacacacatacacacacacatacatacacgtatgtatgtgtgtgtgtcctcaggtaatatcatacataaattgaagagaaaaattttgtctttctttctctccttcctttcttttctccctcccctgccccctctcgtttattttttttttctgaataattgtaacaagctatcaaacctaatgcacagcttcctcccagccccctccctctttcctatgctgaaaatgtcttctttagaagcaataaggttattcttgtgtctggttctcacacttgaaggaacccacctactttcgccctctctttgtaaagaaaggagagctttgacaccacctatcaaaggaacaggaagtagcaagcatggaagatgacccatctggggtcctggccaaactggacaacagccagggtttaatatttttccacctcagtgcctgctgcagatgagcatgggttgctctgcccagctgtcctttctgtcctgtgtcctcttcatcagttacatgaggagttttgcacgcagcacacccggctgctcaactcagtctgccagtctctctgctctgccctccgactctctctcggaatgtgtgtgtgtgtgtgtgtgtgtgtgtgtgtgtgtgtgtgtgtgtatgtgtgtgtgtgtatgtgtgtgtatgtgtgtgtgtgtgtgtatgtgtgtgtgtgtatgtgtgtgtgtgtgtatgtgtgtgtgtgtatgtgtgtgtatgtgtgtgtgtatgtgtgtatatatgtgtgtgtatgtgtgtgtgtatgtgtgtgtgtgtgtatgtgtgtgtgtatgtgtgtgtgtgtgtatatgtgtgtgtatgtgtgtatatatgtgtgtgtgtatgtgtgtgtgtgtgtatatgtgtgtgtatgtgtgtgtatgtgtgtatatatgtgtgtgtatgtgtgtgtgtatgtgtgtgtgtgtatatgtgtgtgtgtatgtgtgtgtatgtgtgtgtgtatgtgtgtgtgtatgtgtgtatatatgtgtgtgtatgtgtgtgtgtatgtgtgtgtgtatgtgtgtgtatgtgtatgtgtgtgtatgtgtgtgtatgtgtgtatatatgtgtgtgtatgtgtgtgtatgtgtgtgtatgtatgtgtgtgtgtatgtgtgtgtgtgtgtatgtgtatgtgcgtgtgtgtgtgtgtgtgtgtgtatgtgtatgtgtgtgtgtgtgtgtgtgtgtgtgtgtatgtgtgtgtgtgtgtgtgtatgtatgtgtgtgtgaatatgtgtgcgtgtgtgtgtatgtgtgtgtgtgtgtatgtgtgtggtgggtcaatgtaaaaatcccgttctgaagaccccattctcagcaatctccccacttttccttactttgaacatgcatcacagcccacattggcctgtacacgcgtgtcacagtccacaggcctgttcacgagtgtcacctctatggttatttactcaagtgtgcattactgtgtgtcacctgtgtttccaggtcatgctctccagctctctggaatggcttctgtaaccatggagttagtaacccagaacattatacatgcaaagcatgtgatttttgcttagggtgcttattgtatctaggaagctcaggttccttttaaatttaaaaaacattatgtgtgcttgcatgcatatttatacaacgtgtgcacattcggtgcccacatgaaggctgggagagggtgttggatgccctggagctggagttatgggtggttgtgatccattccggggtgctcagaaccacatctgtgccatctgctgtaggggaagctgtagccactttatttcctagtccctattcaattaaaccaatgctggacttagaggtggatttggctttcctcctctaaaatccaagcacattatttaactaagctttagtgtttctgtattgtatcaagaagccaattgatgtaatacagaataaaagaagaatttggggactgtctttgtcttttcttggatctttctctcaaggtgtacaccctttcataattgttatgctctcatggttgcattccctagcatgtgtacatacacaagcaaacatttctctactaactgttcatgtttgagtcccacacagccaatgaagacctgcctgacagcaatccctggacaccctagaaagaaaatgggccacacctcctcgactgcactggatccaacttgctccatttcagctgacactccggccagaggtttgggtactgacttcaatcaagttgaggatttcaagcgagatcttcaatcaagtgaatcccatctaacatggactggatactaacattttctttctacaggaccccacatgactatcatcgtcccatttcagcaggaagtaacttggaaaatgctacgccccctttccccattgttgtcacttaggatagtgtatatacctagttaggaatagcttcctattgtttatgactttagggtttagttaaaatagatagttatcttcttatattttacctttatactgttaagttttaatcctcttttagactaaaaggggaattgtaggggaagctgtagccacgccttcttaggggctggctacaagagtacctgagggcttgtgagggcatggtcagagtgagtagggggactgcgttttcagtttcggtttctctttgcttcttgctgtacagactaccaccggctggctggttcgctctgtaagtaaggcttttccctattaaatacccttatatttctacctgactccgtactggtaatttcttactataatctgcaagagcagcaagtgctctaaatcctgggccatcctgcaacagtggacgctgagcctcacgctggtcaaaggaagtctcttcagaaagaggtgcctagggtggagtctgaaggaagagtaggggcagctaggaagaatgagataggcttaggtgttgggagaaagaaattcccatcacagaaaatagcttctgcatgaggcctagagaaggagtcagcggccatcgaggacacactctagcacagcaggcagacagcatatgtgtgagagacgaacaccctcttgtgatgaggccatctgtaatacaacctctatgttaatcagcttttgtcactgtgacgaaacacctgagagaaacaaactgaagggaggaaaggtttacttggctcagggtttcagagatttcaatctattggtcttttgggtccattgtgtctgggtctgtggtcaggcagaaggaacatcatggcagaggtgtgaggtgaggcagtttaagttccttcatggcttgtaggaagcagggggtagagagaaagggaggagaggagaagggaggggaggggaggggaggggaggagaggagaggagaggagaggggagggaggggaggggggagggaggagggaaggggagggtgtaatcccttcaagagcacacctccagtgacctaacttcatctcaccagtcctgtctcctgcagtttccacgtcctcccaacagtggccaagccttggaactacaggtgtgcacttcagtgcctggcttttcccatggatgcttcaggctggactcaggtccttgtagtcacgcagcaggttctttattgacagccacttccccagagtccccagttgtggttcccatctattgcacttattagagtctgcatacattattttttctcttccacgttgttattaattacctattggcgcttttttgggcttaatgaattgtttcactcagctaagtgttgggattgctatagaaaacacttaccataatgcgtgtctattctggcactcttctctcccttcctaagttggaaaccattttttttttttttttttattgagctaatgtttgatgtctctgggcagccattcaaggtaggaatggcaatctgttctggattaatctagggataaaacacttttagcttcagtttggaatgaaaactcaaccttactagcaattatgccatgtttgcataatcagctctgttttaaaaacccttcacttttccctagtgacatcacaaaccgtgggcaagaacaggtgtagaatcaacaacagtataaaagtcatcccctttcaagtactgaaataaattctgtttcatgttgtggtggtttgaaaaaaaaagtgcccccccccaaagggagtggcactattaggaggcgtgaccttcctattaggaggaagtgtgtcatgatgagggtgggctttgaggtctcctatgctcaagctacaaccagtgacacagaccatttcctgttacctgaaagtcaaaatgtaggaccctcaactccatctcctgcaccatgtctgcctgatgataatggatcaaacctttcaaaatgtaagccaccccaattaactgtttttcctttataggagttatcatggtcatggtgtctcttcacagcaatagaaaccctaactaagtcatatatgaactgaaaatatatttcagatatgcaaaattcagtcaatcagattttcagttctagctataatgaagtagaggacagttttatcttctgtgataattaatcttcgttgtcagtttgagtagatttggtatcacctacgagacacagcccttggttctatatgcatagtgttttaattgcgatatgcttcaggctgtttcatcttttggcctagtctagttggggttctgtgtgtgtcttttatcagcacgtgaatgcctttccttagtttggggaagttttattctatgatcttgttgaatatttatgtcattgactaggaatccttctccctcatttatgcctgtaatttaaaagtttgatcttttcatggtgtcctacatttcctgtatgttcctttcatattctttccttattccatctcaatcctctactttatctgcaagtcctaatgttctatcttctgcttgattatttctacttgtaaggctttcctttggttttctagaagctccatctgtatgtaagtttgtgctttcttcaacatttctctttattggatgccattttcaaatcccggatcgtttccatcagccttaggtttgtgtcttcctgggcatctctcaggcatttaataccttttaatttccttttctttaaatccatcaagttgtttcgttgtgtcttctttaaactccttgaattttttgatgaagtctatgatgattcttttaattctgtgtcttgggtccatctaggtaattgctattgccagacatttctataagactagtggatttgggggtgggaggagtcattgccttaattcttcatgttgtttgtatttttgcaaggagatctgggcatgtgaacttcttttgttctgtgtcggagatggacagagcaggttggggcagaagagaggatgggtgggttgggttgggactagattttggatacggcttagatgtaatgaaatcagttggacataggcaactggctgagattcaggagttgcaacctgatccaagcttggaagtagatggtgggtggtggtgcaaaatctttagtgtgtagcttttcctcagacaggctcagtttgtctcctccatgcccttcagattccacattctcactccaggcaggaggaagcagtaaggaccacagcatggctgtcagccagtctttgacattgtttttcaatggtaaacaattgtttttctatcatttctacctggtagaatgcagcttccatctcactggccagcactgtgttacttgctcattcttaactgcaaagggaactgggaaatcctcctcgcccaatgtttttcctatgtaaatgtatctgatttttctcccccggagacatccctggtttgttctgtcacctcctacattgaatatgctttaggcttgatgccctgccagaaccttgggacacgtctgtttcctccagcccaagagtttctttcccctcttcagagtgtggcctctgcttctttaactctagctttactctcttgacaggcaatgcacgtccatcaataacttttggaataggaaagtagaaatttcaaggtgttgcatgcttggatagcctgtacatcatgtcacacttggatggtagctgagctgaggaaactattagactgacatagtttggttttggaaagatgttgctgtctaaggatttggttgagaagtctgatgtcatgcttaccctagaacttgtacctatatatttttaatctctcagaactttttggaatgttatgaaggagatttttttaaagaatttttgttgtattgggtactgacaggctttttaaatctggaggtatatgtccttcaaatccaggaaaactttcatagcacttctttgaccctttcttaagttctgctctctgtagtgactaataacattgtgcctcttgggttatcttttgtattgtcctacttttgtcttctggtgccttgcatttgctagacaaatgctccaatactgagctaaatccccaagtgcacctcttacattttatttcacttccttgtaatttgttgtctacatgatctatctttctgtcattttactcctaacttacctgcattgtttatgtagtatacatctctggtaaatacacacagtggaatcattcattcagtctgacaaccattgacttttaatagacctagtcagtccattcatatttaagtaattattgatatagtttgggttcaagccacactattttcttgtgtttgctttttgtggtctttttcctttggtacctttttttccccctgaaatctattaatttaactgaatacttgttctagttgcctttctattgttatgataaagcactataaccaaaagcaacttaggggaggaaatggtttatttagcttacattttcagagattctcctccaggccctaatctgcctgacactaccttttatactcactctcctcaaaacccctagatctagcctgggtcccatgaccagtgctctagcctcgtctggttagcctgtgctaccaacaatccctaggctatcaacagtacctgctcttcctatccccagcctacagctccctcccacaccacagccaaccactccatcctatggtaccctgaacatctgcctctaggctctgcccagataaccaggtacaccaatagggtgaggttggtccctcccatggctgcaccttctttccctactctggtcatgtcctattgacaatctgcatattgatgaaatctcctaacatttgcttgcacgtcccccgcccagcaaaagcagtttcctaggggaccactgtcttggttgctcaccagtttggttgagcctgattcctgtgtacttcttccctggggcttctggtatggttggcaaaccttcctctttaagacctctgattgtaacaaatcctttagtttcgtatagtgttctgagtatgatttccatcacactgtcacagtggtccttaaagaccccgcaaggggaccctgatccttcattactacacagagagggaatgcaaaggtccagctgttcaagattgaaatgaaataatggggactgaggagatggcccagtctacaaaatgtttgttatgtacccatgaggccctgagttcaatcctcagaacccatgtgaaaatgccaagtgaggcagtgtgcacctgctagtccagtgctgggaggcagagagaggcagatggctgggacttgccggtgagccacatcagtgagctccaggttcagtgagagagcttgtctcactttcatgtacacatacttgtaaatgctcactcaactcccacacgtgtacacacacacacacaaaagcaatactatagaattgctttgacaacatagagagacacgtagttgttggccaagcagaagagaatcacctcttaacaaagttgtcagacgcaagggagagatggaagtatggcattgtggaaagaaaaacagatttcatgacccttgctaggtggctctcagttactatagcaaatacttgtgatcatcaacttataaagaagcaatgtttattgttaaagttctcatctttaaagcttctacccatggccaatcagctctgttgtttggggtctagggtagggggtccatggtggagcaaagccagtctcttcttggaggggaaatgaaagggagatggaagagtccagggtgtcgtagtcaccttcaagtgcacaccctccatgacagaaacccttcctactaggtcacaccttgtaatagtcccacaatcttgcaattgcacaagggattaatcctttaatatacgggcctttgggcattctaggaacaactaatatggcaccttttccacccacttctatggccctgtcatataaagaagtagaaaagcactaaggtaagtctatcaaaggcaacctcacttcccaggacaaaatgatattatgttgcctcacaaaattcatcactccttagaagttcttctcttcttccctcctgactcaacatgcttttcaaaataagtgatctgagacacatcactcatcccttctggttgccatgtgactctcacatttcatatttaagcctgagccctgtggactcaggtgtcccatccaaacagatttgatgcaacagcatgagtgtttttagagaaaaaaatttcaaaatctaattgctggcagcaagaacaaagattcaaccttcagctttttcagatgtaggtggattctatacacacagatacctttaaatttttaattttaaatcctcgagttcttgcgaagaagacattaggtgagctgagggcaattttttgttatttggaacattctattcttagtaaaattagctatgctccaaaacaggaaggggaaaatgccagcaaattgccagttattgtatctctttagttcttgtaagcatgatgaggtgtgctcctgttggtattcaacatggaacttgtagaggacagtcacttggtccttggtcatcttgttgtcaagttggggttggacctcaggttgtttgactctctttactctcttttcctctactccagacatgtgactgccaggaagacaggacacattccgacagtgtcctcaataaggcaagtttataaaatatatagattaacagttatgggtgatacttaagacagctagcaaataagaaatcttagtcattggtcaatagcattgtacctaatataagactctgtgtgttatttcaggcacccaaatggcagtggggctcaggcggcttggcagaaagatttatcgttacagaactgttccatgtctattgttcctagggcctcaggggatgccagtaacctgcagtgtgttacaaagattatcacaaattccaaataactgtattgtctcattttcaatttgtccgctgatttttgtgactcacagtctaggttctctggtgacctccatagatgactgtcttcaatttgaagtaaatcctcatatactgagaattagagataggtaggtattggatgtagtgtggctgggtacaaccatgatctgagagaagggagagatggaaccttactttgtgttaaagctaccatagaagctctgagccaacccaagagtatttacttagatcaggttgacctgtagttctgtctatctacctgcttatctgtttatccacccatccatctatctctccatccattcatccatccatccacccatccatccatcatctatctatctacctacctatctaccatctacccacctataacctgtctgcctgcctgcctgtccatctatttgcagtcaggatgctgtagtggggagggcactcatagaaccacttagttgtctccagttcctgggttccctctgctgtgatttcatcttacagtccagaagcctaaactcagcacaattcactgccaagcactgttgtttctaacactcttgctggtttgtgtgtgtgtgtgtgtgtgtgtgtgtgtgtgtgtgtgtgtgtctttgtgtgtctttgtgtgtgtgtgtgtttgtgtgcgtgtgtgtgtgtttgtgtgtgtttgtgtgtgtgtgtgtgtgtgtgtgtgtgtgtgtgtgtgtatgtgtgtgtgtgtgctcacatgtgcgcccacctgtctctcttcctcagcaatagagtttagactatacacaccttcagtgccatctttctgtggtgtgaatgctgaggatcaaagtcaaatccccatgattacaaggcaagctctttacagccaagccactcccctagatggctcgctgttctccttctgtggctgcatcacacactagtgcctatttaattaggttcttatacattttcccatagattatcatggtcactgtctggatgagagacactgggaggtaaatatggtgagatccagggaagaggggtcccagctgggctgcttcggctccacagacagggtggacactagggtggaaccttctttttaaaagtcaagtttctttgtccagagcaacctcaggatcacaggaaaatgaaataaaagactcagaatgtttccacataccctattcccatgtagacacagcctccctgacgatcagcatgcccaagagggtggctcatctatgccactgaagatcctgtgtgggctcatctttgtagacccagagcccatccttgcaatgaagtcactccaatacaaggttggatgtgcaggcgtaatgccaatgtccacaccaggctggctgtagttggtggagcctaacccacctttccccttccagtttcaaagctcttatacttcccaatctgttccttgaacacgtgcactaatgcagaaggtcaccccatacggacctgtattgccgaggcacatctgatggacgttttgtggctgcccagttcctctccacatttcgactttggattgtgtctcttcttggcaaggttgctgcttttcaaggtcctgtcttgttcttaaagtacgaaagtgcagtgagctgctaatggaggcaggagaaagctgtgggagacagactcacacacaaagggaggacactcacagcctgaatctcaacgaggaggtttaggccaactgaaggggggacactactgagccggatgactgtaaggtccctctcaaatcacagcaggaagcctccagctccacctgtgtcagactagggcacagcctgagggagcatcttgtgttcccctgagtgtttctaaacctgattaatatgaccatcaccagtaacctgccctctcaccctcccttcttccttcctagcttctttgtcttccttctttcactgagaagatgaacaaactcctcaattcaggtctcctagggctgggggctggaggcaatggtggtgggctaatagctttctggagaaaaaaagtttgtgactttattgacataaacaatgggtggcatactatttatgactagtaataaatacatatacgatacttaatttaaaaatccatgctttctatagactcacaaaatgcttctgttggcttttgctgaggtcgtgtatccaaggccaacctttgcggcaattcaaccccaccaggagtcacggagttgatcccagcctattaaatcccttcataatcagtttatcagaatatccgctctgtagtcagtccgctgctgattaccactgcatgtaggtcatgactttgaaactgaaagatcctttggctccagacatgtttgtaatgcaggtcttcaaataacagtttctttaagaccttgcaaattactgatcttttctctcttagctcttgtggatgtgcaagcctgctcctgcctctgggagtgccggcgattctcctcacattttctctaaccaccatcagtctctgtcatgcttcgtgtggggagtctgctgacatcggataccttccggtcctcaatgcctggaaaccagctaccagagcagactggggcttccaagtggagttctggcctctttgtgtggtgacaccacccctaaaaaccactatccaccgttcacctcccaactcaggcagaggtgctcagtccttaaggaacaagcagagatacagaggaggagggcgggagcttagagcaaggcttttcagtctgttttctccagcctttgtgtccttcctcctgcttgacagcttcttccatggcatgactgtccagagtcagcatgacagccacaggccttctcagcccttctgtgccttgatcactttccttcctcactttgtgagtctggtttgtcacagaggccaattctaagaggaaagataagaagttgttgttgttttttttaatgtacctataaatagcatcagtaataacatcaatgtatatgtagagaagaaaaggaaaacagaccccaatatgtttcattattctttgtattctttgtgtgtcttaacctcccacccaggaacctgcaattccacatcgctactatgtatagcagccccaggactcactcgaatacagagtacatgacttccccttccagattgtctattgactgggcagccaattgccctaaaattgagtgctatgtttttgccagttggctgcagagagttgttaatttccagtgtggttaatgcaaccattactaactctgtggcttcagggagaattagaaactgtattaattacttttcttataaatgtgaccatggcaagaaacaacttaaaggcaggagggtttatttggactcccagtttaaggctcaaaggaaagtgtgatcccaacagtggcagcaggtgtggccccaacaatgatagcagggtcaagggaaggcatgaccccaacagtggcagcaggaggcttcttgcttggtggtagaccagaaagcaaggggattggcattggggtggaattggccttcctgggctgggctataacacctaaacctacctccagttactgacttcctcttgctatgttccatctcctaaagggactacaattccccaagcagtaccctcagctgcatacctagtgttcaaacacatgagcccgtgaaagacctttcatactcaaaccataacagggacagagcaagaatgcggaagtaaagaaaaggaaagcaaaaatgaacacaaacctactttagaaaatggaatgtgttttatttattctcagtcttatatgtgtaatcaatgtatctgacaatatccactcccaattctctcctctcacttccccaaggaactcctaaaacatctcctgtcccattgcatgtcctgttccctcttttttgtaacccagtggtttcaactggtattacctatgaaatattaactgtcgcattggcttgatctgcacatgtcttatgtagatagccgtagctgcagtgagatcatgagtgcaatgcctgtgtcatgtccacagggcagcatctcaaagcaccttgtcctcattctccagctctgacattcttcccatcttctcctcgtctgtgtcctcaagactagggagtgttgacacagatgtcccatttggtgctgaacatttagcagtcagttatcctcagcacatagacaaattatgagtttctgtattaactgatgatcatgagagagagagagagagagagagagagagagagagagagagagaagcttatcttgccaaagctgagggaagccctaatccatgggtctcagcgttattatgaagaagatagtttaacaataagtccatttagcaacagaattgtagtagatcatccctcctgcccctgggcttataacatcccaagccagaggcttttgaccatgtttacagaaccagttatgaattccctcttgtggtgaaaacctcaaatccagctcaaaggcagctggataaccacataacctttgtaccactattgtatcagtgagaacatctcatttttacctggcaggttggtatcatataagttctctctctctttctccctctctctctctctctctctctctctctctctctctctctctgtgtgtgtgtgtgtgtgtgtgtgtgaatatgtgtatggagtatacgcacatgggcaggcatgaacatacatgtgtgcatactcagtagacaggtgatgatgtcaggtggcctactctgtcacttgccgccttagtcccttgagaaagggtctctcactgaacttggagctaggctacagccagataaaccctagtgcctgtcctattcccacccctcagagctctggggttataggtgtgcagacagtcaggcctggcgtttgatctgaattctagggtttgatttcagctccttgtgcttgctcggcaagctttcctacatgatgaagcatctcctcagcctccctaaactattttttattagaattttttaaaagttggagtgaaattcatgtaacttaaaatcattttaactatttgagtttgccatccagtaatcttcactattcacaatattgctcagccattattgctgtctggttccaggacaatctttcatccccaaaggaaaccctggacccctgagcatcagtccctctccccctccctccagccaccagtggtgaccacgaatcatctgcctgggtatttcatagatgcattattccaccactcctggcattttgttcatttagcatgtttccaaggtctatcctataggtcccatgaatcagttttgaactctggagaaatataagccacaggcccacgtctcctgttagatttctccatctgccccattttacctgttggtctgtgaaacagtggtcatcataaactcaaatttgatgccttactctgattcctggaaaacgggcaaaggaaaccaaaagaaataaagaacattacccatctcagacaaacaaatgttcctccagacaggtcaactgtgtttgttgtaagtcttggttatattttagtttagagccacttacagatggctctctgttagcaaggtcttgggtaagtagcagctgacttgatactgtctctttaacggatctcactttctggtgcacacgggagcagaagacaaagctatggccatgcagaaataaagggcatcaacagaaacccgtgggctcacagggcagacgcttcagttagtgtccagggaggagctcagtgactctacttgtgacacagcagttgtgtaagggaatggctctgtggcatctctgctcgatagtggctcagctcctcgtcacgaatatttacaacaggaaaacagagacgcttgtgaagtttctggttctcctcttacgtcagctgtcctccaagcctcttgtgagaggagctctgagtaaagaactaaggctgattcacgtttgtgcaaactggaatctgtgatggtttaaagaccctcatctgtgcagtaacaggactcctgacatcagtttgtgtgactgtgttcgtcagaggaatttcatgtcagcaaaacaacctaaaagagctcaatggtttaatacagtaaatgtttgctccatcccgattcagaatatgtgtctcttctaatggcttggggattcagtctctctttgtctttcagctctctgtccagtgcagcccttctagagtcctccacgtagtcactacattaagcaagtaaagactgcttgggtagaaaagactggatttttagactctaggcttgtatcatttgcagttatatcctggtgaagatccatctctattgccaactgtgattcagaagtaccatggaaacaaagctcagggcatggtctgtgaagagattgtgttaattgagatgggaagatccactgcgaatgtgggaatgtgggcactactctttcagggctgggatcctggaatgcggagggggggggggagtaaaagggttgttgtgcaagcatgagaacctgacgtcaatccccagaacccaagaaaaatgtggaagtatacaatgagtatctgagtatctgtaattccggtctttctgtagattcaatgtaaccagctgcctcctgcgacagtctgtatgccttctcctccatgacagaccgtaccttcaaaccttagccaaggtaaaccaaggcttctttcccaagttattttgatagatattttgtcacagcatattttgatagatattttgtcacagcatcagaagtaaccaataaagtccctttggctagaacaagagatctagaggtagtttgtgtgtcctcccaggaagaaatgatgctatctagtgcaagagatctgggggtaccttgtgtcctcccaggaagaaatgatgctatctagagcaagagatctggaggtaccttgtgtcctcccaggaagaaatgatgctatctagccagtccctgctgtagctgtaattgttactttcccttgtgcatgctccagaaggggagggcatgggggaagggagattgcctcccaggtcagtcctgtgacacttacatttcaccttgtaggattccagcctaggggcagtggtgggtggggtggggtggggggggaggtgggttgggtggaggtggggtgggtggaggtggggtggggtggggtggaggtgaggtggggtggaggtggggcagggtcaggaagattccttttaaccatgaaccatcttcactctgctgctatttccttcagttccagaacactccatctccctccaatgggatagtctatcaccaagctgatctcagagtgaggagtctatgcctcttctccctccccatacccccctaccccgtccctcctccaccctctccctcatctcccatctttgcagtccagccaagaccagactgtaataagactttactgcagtttttaatatcacagaaggtaattacaatgcaggagaatgtaaaagtaaaattagccatgactctgccagccagatctctgtcctcagagtccactagatgaagcctgtgtagttccttcgattggctgcctcagcctcactgtggtaaaagtcagcactctccatggggcagtcttcatggatgtccatgggacaccttcagtgagtcacagtccctatgtccccaaatccctcaaaagataaaaagagttccttgtcttctgagtcattcattcatgatcttcatctatccattccagtatgacaggttgtgagaatttctgtgctttgtttttttggtttttaagaaaaaaaagccaccttcaatctcagctggacagctctttaaacatacaaactgactgaaccagagttacaaatcacagatcctaggaaagaacctctgattatattattattattattattattattattattattattattaaagtctaaacctcttcagtgacaaacaagagtccatcaagataacttaagcaaaaaagcaagtctgtataaaatgtgtagaagcaacaggaccacaggtaggaggcaggtccctttcccagagcttgggtcattagcagctaaatctttttcagttctttctgactgggcatactctttctctcttgggtatctgtgagggatcaccttgactaggttaagtgaggtagaagccccaccctatgagtaggcaaggccatcctgttagcacaggcatttgttgctgtaggtgcaatgtgaccagctgcaccgtgctggactgtacccttgaacagtgagccgaattcaaccatttatctcctaaatttcttttgtcaggtaggagctcagtaaggatattttaccatagcaatcagaataggaccactacaggatggggtttatgaatatcactgctattgggtacgttgtgttttgaggaagtcactgctgtgacactgtgattctcagagcagaaacgtccttgtgatttcattttctgctgtcactgattaatgtgagactattccggactccatcttctttgttcagtgttgaggtttatgggtttaacttgggtcatagctaaaatccctccctgtccctgcacgaaggaaacagctcctcgtgttgagtcttggagggagctcaatcccaagatgacagccaatggttctctaagttgccctcccacatctgcctacagatagctgccttcttttctgtcatacttttgtcgagcacataaagaacttgagaagttctttgcgcgtgttaggcctcagctaatgctccttggaatgggtgaatggctggttggttcacatggtcccactggcgcccaggcctgtgggccccctgctgccttgccctatgccctcagcactacacttgtttccatattgccagttgactgactttggctttttttggtcttcagttttctgaaactttcccaaccctcttgactagcagaattaattttcacctccttccaccacttcagtaaccggcttgcgttgttagtaaatcatgtcatactgagtttctgatattcacactgagactgcctgcccagatagagtgtgaactgattaaacacagggatggtttctatacactgattttgtgatagatgaggaaaaggatgtttcttaaaagcacaaatcaataaatgaatgaggtataccaaccttcagctaaaatttgaggtactgtaacagtcttcaattcatttttttttttttgtaccttttaggttttatacccgcccccaaattcctatcagctatttctggtattccccagtattatatattttcccattcattattttaaataaatattttgtttcttttttttttcatggatatgtgtgtgcgtatgtgtgtggaggtcagagttcatcgtggggcagtcagttctcttttcccaccgtgtatgttacagggggtgacctcgggtcgtcaggtttgactgtgtgtggcttcctttggagttctgtcctcttctcccagcctgagtgttatacctctgcctgctagtccatctcaacagcccacattaaatatgtttctaggcatcccctaggaccaaataatataccagaccctggggagctaacaatcgatggtgacggtttctatgagacaataagtagcacttctctttccaaagtttgaattaaaaaaaatgaaagaacacaagaaagagctggcatctgtctaaagcaaagtaccacacctaaaacttcttaacaaaactgtcatgggagaaggttccttgtgctgctgtgtaaatgggcttcttctcctttaaatgtttattttatgattatctatgcgtatgtatatctgtctgtgtgggggtttgtgcaagtgagtatcagtgcccactgaggccaaaggcatcaaatttccctagtattagagttacaggtagatataagtcacccgacttgggtgctgggaattgcactcagatcccctgtagcatcggttcacactcttacccactgagccatgtccccagcccctaactaggtttcttgatattaagctagataaagggactcacccatccagtggtccctggtgattctcagagtggccagatctatgaaataaactagccatggagaaacagtgtgtgttctccaaaggaagcctaaccaccctgggagagggcagggaagttgagctgatggataattctggttatctatcggctatctgactctccccatcaccctggctctcacaacagtgacagtgaatgcaccactgtccatacatctagaggtgcagcccatgctggtgccactcaagggccgtcaccatgatggtcaagcctttctccaaagctgctaacacctggtcaagttgacaatgtcagtgctgatgcttgtggttggcacagtcaccaaagttgctgaagatgttgttggcatcagaactgtgtgctgggcatctcggtgactgtctacaacaggatcacctcctacttgctcttttcctgtagccagtaggcataagactcaggctgggatggtgaggatggatcggaaggatgactctagggggagtcatgagcagcatctcagagagatgtcagcagacccgaaggaagacagctttccccacacagcctttttgggaggagcccgatggatcacgtgatctacactgaagtatgaatttgtaatgcttgaaaatccattaatatcttgtgaataacaccaattatttgcaatgtattttttttattttggtgttaaaaaccaaatatgttagtatgctaaatgaaaatgtgtaaaatatgcctgcttttataacctggtactgacaacctttcttgtaatattctggaagttacaaaagcaggaatctgaaactccatgagcctctgagaagccccctcactctctttatccctctgcccctcccactcttgactgatgtcctgggatagacttgcttgttctagaactttcttaatcaggaattctttccctctatttctcatttaagaaaattcccagtgggtcttccatatgcctacaagtgctggcaccacgcctcagcatgttcatgccatgtttgagctatgacctgaatgggcttaatgcaccctgggtccctgcagggacaggaatgaaccaagaaggatttacctacattaatccaagagcttatttcaattaataaaagcaactttcatggggcagagagaaggagaccatgttgcttacatttctttctagtcttctgtgcttatcttggattcagccctgagtcagcccacacatttaaacagtcacccacaagtctcaagggttcataacttgagggatggttcaaacccatttttgtgggggcttggataaacaaaccttcctccacagggcttctagatctttccatgttttctttctcacttctatttctatttaggattctaatgtatttgtgatttgtggtttgtgtttttatttgttccctggggaaggtgttggttgaaatgcctctaagaggctgggagaagcaagaaggaagaagataaacttgcaccgaccttctttaagggaggtaactgctggtggaggccttgtcttacaattgggtgctgctaaaatctccctttgcctgcttgtccaccaactagcccagctagttctttcatatatatatcttcgttccttaattctcagtgatgttggaattctctgggtgcttaaggttgttgctgattccctggctatttttggttaacagcatcaccaggatctcactgtagactcctcagatcttgtgatctctctggggaaaaaaaagaaatcagagaacacacagacatagtgtagaagatacatacaatttatcatggagcaaagagaaatactcttaagagataagaatggccagatggaccaccaagccaaactatattctagactagttttatacaatttctatatagtctggcagactactttctagaggagcattttcctggaggataggcaatggacaggcccatttggattgatgcctactcgagaggataaggtatacccttgtactttatcacaaagcatctggatagcaatctcacagggttaaggtctcctagaatccggcttagatgtttattaactaatgctatccacatagcagtgtaggatgtcacacctcttcccagggccagagatatgacttggtccattccttgggctggtagctctgtagttctggtaattttggtagtttgggtactgtaggtccagccttagttttacaagctgttgattatgagggaggggtccagtcctaatggcctctaatcctgccaattagcgatctaacagtgtcatcaccggtacgtgccggtccggaacacacatgcaaatgctcaagtaacctagtcatctgaggtaaccagaagtgtttctgaaatgataagccgccttcaaattattcagcgagcctccctccagttcacaggcctttgcaacagcagggaaagcagcaggaaagaggtttaacaggaagggaaataaaaaaaagggagacatcaccaacaggaaccaccacccttggggatatttgctaacatgtgtggtcctgtatatattgctcaagggtctgtttctttctagagggctgtttgaggacaatagcctcaatttgtgtcatttgaatgtcatatacccagttctggatcttaatggctcttgataaaaatatgactagcaggcgtgctcgctttggctcccttccctctaactctatcctacatgtccctgccctatcacaagggaaacccatctctttagattgacagtttagctcacagggtttcatactcttgaagctaacctttctttgggttgaaaagaaatagtttcaaagggattaattgcttagaggataagaaccttaatacattaaaaataacagcttacaggacccctcaaagttgattggccatttggttaagtgtttcttagcactgcagggctgaggtagacatctactgtaggagcgaaaaaaaattgttttctccttactttcctttgcacccgagagtaaaatcagtacaagacaggtgaacaggagaaaaacaaaatcacttttaattatgcacatctacgctgttgctcacaggaaaaaatgtggttcaagaaagcagccagaattggatgttcatattccatcttagccatggtaaggaaaaggggattttaatcttggtggggaaggggagttacaagaagatggatgagcaagggagtctgttaaaatgcagtttgcagatgtaactgggtgtttcctctggtggtgagtttacagcttcacccttttctcttagtacaggacagcgtgtcacctttacagatggggattgcttttccaagtgtagacacccttaaaaagggaaacttacattttcagagtttttcctgggtctgccattcctcaattgccttcagcacagaatagtccatatgctgaggagcctattttggggtggtgtattcctgtccccatcactatcatagttctttctacattgggatagacttctaaaatcctatgtgctttagtttacatggtcaatacatttgggaaccataacactaatttctgtaagtccctggtattgccacaatgctctgttgagtggaatccggtggcctagtgtgtatgacctatactgtgtcttcaaggaagagcacttatattctttcatgacattttgtgggtccagaacccactgaacacatgtcagcgtaagacaacacaaagaatgaagagaaggaaggaggcatgacagagggcaatgcagagctcagtggggctgggatgccgagtgccatctgggcagaggaagaactaatggccaaagctgaatatttgccccttgcctccctggtacccagccctgcttttgtcaagagcccctgttctcctttgggatccatttcacttccacctcatcatgtatggtccagatggggtgcttgctctgggggcagaagctggattaaggccgaaccagctgtcacagcatatttagttggcacaggggtagtgtagtgacccatagcagtggagtcactgtgaattttcggacatttcttaagagttctgaataagaaatgttcactgtgagaacagggggtagaaactggctagggagggcaggaaccccagagtgacaattctcacagcatctttgctggaggacaaacatgccagaggagagctctgattcttgtttcttccttcatccactaaaccagtacttctgcctagaagactgacagagatggagagaaggagcctggagtaactagctcaccctcttctctcaaacgtcaaccagttcattccataattaagccctttagaggacaccagactgacctctcctgctacatcagagctctacatacgcggttaccctcccctgccctaccctctcccttaccacccatctccaccacgcttaagaatctgtaataaacttctctctgaaacatacccactgtggcctgtgaattattcttcaaatttgcaagacaagaacccgacttcagtggccttcgatttttttttttttccagaaccttagctccttaagtggagaaagcctccattgtccccagacacccaatctcctctgtcactggggaagatgtttccagggcaggtagcactattttaggactgtcgataaagaaaaagaagggaatgggtacagaggctgctgactcataggacacttagaaaatcagccccagaaatcagttgaacattctgcttgaacttctgaacttcccaaggaaaccagctcatggacttctttttggttcagatcgctttgggtcaaatacggtgttatttgcaaatgtgaaaaaaaattggaatgtagacaagggttgttccaattccttcaagttcaaagagtgaacgttagaaaaaaaaagccaacacatagtaagaggatgctagaaagacccacggagcaggagcaatggtccctgtgaaataacagcacccaaggtgacaggctgtgtcaacagctgatacgttacttatcttccaattcagtttttaaggtttaacttttggctaactccccaacatttttgtttaaaacataattttaataatctaaatataggctacaaaccttcccaaggcctactgaccttctgagaaatatgtgaactataaaaaccaaaaataaaccaagtcccttttctaaaagcctttagccatctgaaagtcaaaaggggccgtggattcctacagttcagttcactgagactttgttaccaatagcaacagatggttattttgaacacaagctccaacatctctgtctttctccatattcttattggcaaatgggaagaaaatctatggtaacctcctacagtgaaaataccagataattttagatagtcccagatacatatcaactttgtccttcaacccctcatacacactcagaacctatggcttcaattccattatcatttgtgtccccactgattggaacacaaagttctctcatggttaggggttccatctcaacagtacaaaaaagtactgatggttgaatgacctgttaatgaggaaaagagtatactttggaggctgagaggtccttgtgctcactgataagcaccaggagaaccaggagtgttaaacacacagggctgtatcttcaaagggagagatgtataacctattttctactcagaaggctgggagtggacgtagtttataacctggtgacctttgtgctatctgtatagttgagaccacaatggatcctcccacagaccctattgtgagctggtcatctataaaacacatctttattgatgatgtcacatgtcctgtacaaggagtttggatgctagtcacatcttaagctttactgtgcatagtggattgggttacttgtcaccacaaaaatttccaccaaactgagctgtgtttaagtatgcctaaaattaattactcagggccagactcctgaagttagaaccaatacctgctattgagtcctgctagcccccccaaagatcattattctgctggtcatggtggtcaaagagaccccgtcttaggaattttattgttgtggcaaggcaccatgaccaaaaagcaagttgggaaggaaaggctttcatatcactgttcatccctgaaggaagccaggacagggacccaagcagggcaggaacatggaggcaggagctgatggggggtgctacttactgacttgcttcccctggtttgttcagcctgtttcgttatagaacccaagtagtccgggacatcactacccaccatgggctgggccctcccacattgatctctagttgagaaaatgctttacagctggatctcatggagacatttcctcagctgaggctccttcctctctgaggacgctagcttgtgtcaagttgacacacaaaaccagccagtagactccccacaagtaaagacatttttctacaatccactactaggaggaaagatgataaattggatccagctgggaaatttcaccgttgtttgagaagtcctacagaggttaaatctttcgcttttggaagaatggtcattatttcactcgtatctaggaaattctaagtgccatttctgatccttcttccatacagtttgtacctaaggctaggccggtagtgacaagtgcataggaatggtttctgtggtcttgtagagtctgatacaccgaaactttctcttcaaacatcttgctcctgtccatgagagttggagtggcaatgattcatgcggtggtttaaaaaccacatctgtaagttcttttacagacacttcataacatggtgggctttagttcccttccctttgaatattgaatcggcctcagtcactcacttttaaaggctacgttgcatgaagtgacactgtgtgatttccggtgttactttaggtaaagcaatgcaaagtcttcatggctgtttttctatgacagataccttgggagcctggagctaacacatgagaagtgggttccccagaagccaccatcttagagaggcatcttcatatttggggttgctcgatccgtgtggcttcttatcctctctgaggttacccgcagtcctcttctcctggatcattctgtgagtaggtaggtagaggttagcgggtaggggctgatcatccagccaatccaagtgaaggagtgcaaggcactctaccttttgatgcgaggtattgggagaattaatgactgcttggaatatcccaatagtggccatttaaacatttctttgaatggtaggagttaaggggctgaattttaaggcgcagaactggtttattccttcttgattcatgaagtgtcacaagaagctgcactgaagagagcttggtccagctccctttgtcttgcaaaacaccacttgccctttcttttcccttaagaacaatggtcccattggaactgagagatccaggcctaggaaacagaaaggagggggtgaagtcttcacagggtctcaagcactgtcctgaatctccacagactagcacaactgaaatatgagtgtgtacagtgcacacatgtatacaataaatgctattccagagggcactgatgatggttagttcagtggtccaagccagagactgaaatacatggcagaaatcttgcccaaacacctgcttccacaggatcaaatctcacgcattctctgaccagagttttgatccatttggagatttgaaagtaaaatgagtcctagtttctgctttgggagcgacttaaggagacccacatttaattcctcctgtgaagtgtgttcaaagacaccacgggatcccaggagcaatgggttcagatcctgtgtgggctggtaagacataaaaggacttgggggtaaagctttcctatcttcagtgtgcctcacatagaagaatatgaattaaaactgagatacgaagccagacactgtggttgtttttactgtaacagcattgcaaaacatgaactcagatcaccctgaatcctgccactctttagacacatctggccatcatccttcaagtgtaagctgctgccttgctaatgagaaagcacttggtaggcaggcgtttgtcttgcctttcattcctgttgggcaaagctaaagagaaagctaagagcagggaagtttgtgggcatgcaggggacggaggaaaggagcagctaatacttaggtttggttttgcctttgttcaccagaagatactgatgtagggatggagtcatgagtgcagttaccatgccaacaaggcagagatctgtaaatgtgggattaaatacaaaatagggggaatttaaatattatgctctaaaaattggtccttcataacacatatattgcaatgatatcatataaggaacaaaagcaaaggatagaaaagtttgccttcccttcctcagatataaccacctcttctagaggtgagcaaaggcactcaggcctgtgggtaactgagaagcatgtcaggatagtcacctccctgagtagatgtattccagacagcaaattgccataggggtagaagtggacacagaccctcatcactgttgcaatgctgagccctcataccatcagatactcacttctggacctgggctatctctgtctcctgctctagccaagagccctcaccattgtctttcccctcctctcctcactgtgaccactgcaactcgactctttgacacagtccaaccactctgtgttgatgactttactgtctgctcgttgctctgggtttcgcagcttaggtaccctcagatctgtgcagtgcttctgatcttggacagcactgagactcgagtagtcaaggcctttctgtcacaatgctaacgtttatgtgatgttgagggaagagtcttgagctatgctttctggctccagtagcattgactcaacacaattcaggggtaggttcgaccctgtcagtaacaaaatctctccagtagagactctcaacaggaacaggcacagaagtacaaacaagttctcacgagtctttgccaaattctcccagagtatgaaaaagctgccctcctttgccacacgtgtctcatgtatgtctaggaagcaagctttcattttgtatctgtttcctctttgtgaattatttgcaaacaagggctaagaaggatatcccaccatagacctggtcagcattttgtggtcctgcaacaggagccagatatgagagacccaaagggctacagtttagaacttagctggagggctcccttgcccagcatgggacatccacaggtgagagctgggtctcaggctggtgctgttttctctctaaccacatgagtgggaaccagtgagatccggagtgagcatatcccccgctcccacccaagtttgccaagcagagtccacgatctgaaaagaagataccaagcaagacagcctggttgtgacagcagcacagagaactaggagagaggcagaggagaagagccttccttcttcctgccagccacacccttgagtggtcacgtgtctctgggcaggtctcatgttatctgtgtcttttcttaaccagcataaaattgtcataatggaacccttgagttgtggtcagtgccatcacggcttcactccctcctcatacttcctgcctgtgaaatgtccttctgactgcctttgatattttattaatattgacattagccccgaagggttggggggggtgggaattgctcttatgcattaatggctcctctttttagagagaaagtgtacaactcacagcattgccatttttcagagtcaaaaccagtcttgggatattatacacacccccataagacaaaggaaagctagtaaggcttcattgctttagggccaggaaattagcacatgtaacagggtgatctcttcagaatgtttgtcttagcaaagcatgcctactaagcaatctgggcttcttcattttgttttgtttagacaaggtctgtctttttgtgactgggttacctcactcaggatggtttcttctagttccatccatttgcctgtggatttcaagattctattgttttgttttgtttgtttgttttttccgctgagtagtactccattgtataaatgtaccacattttctctatccattcttcagttgaggggcatctaggttgcttcaaggttctggctattacaaacaatgctgctgtgaacatagttgaacatatgtccttgttgtatgaacatgcactatttgggtatatacccaagagaggaattgctggatcttgaggtagactgattcccatttttctgagcagccgccatactgatttccaaagtggtcttacaagtttgcactcccaccagcaatggaagagtgttcctttttctccacatcctctccagcatagtttgtcattggtgtttttgattttagccattctgacaggtgtgaggtggtatctcagagttgttttgagttgcatttatctgatggccaaggattttgagcactttcttaagtgtcttttagccatttcagattcctctgttgagaattctctatttagttctgcaccccactcttaaatttcgttgtttggtgttttggtggctagcttcttgagttcattgtatattttggaaatcagccctctgtcagatgtggggttggtgaagatcttttcccattctgtggactgtcgttttgtcttactgtctgtgtcctttgccttacagaagcttctcagtttcagaaggtcccattcattaattgaagatcatggtatgtactcactcatatatgaattttagacatagagcaaaggattaccagcctacaatcctcttcaccaaagaaattaggaaacatgaaggactctaggggataaatgcatagattccaggaatgggaaggggcaggaactcctgagctaattgggagcatgagggtagggtagagggagctggagaagaggagaggagaggaggaaatggaggagcagaaatattgagttgggggaagaatagaggagagcaggatgagagataccatattagagggagccattttaggtccaaggagagatctggcactagggagatatccagagacctacaaggataacaatccaggcaatgatggagaggataacctaaacgcccttcccctaaaatgagattgatgactttttttttttatgccatcctagagccctcatccagtggctgatggaagcagtggcagacacccacagacatacactgaactgaactctggaacttagctgcagagagggaggaatgaagatcaaagggttctgtaccaggctggtgaaacccacagaaacagctggcctgtacaagggggatcacatggaccccagactgctgtcagggaggccagtacagaactgacccagacccctgaacatggatgtcaatgaggaggcctctgcactctagggggcccctggtagtggattagtattttccctggtgtaagaagggactttgagagcccatcccacatgaagggatgcactcttgcctggacacatgggggagggcctaggcctggcccaggatgatgtggtggattttgtggagtccctgtggaaagctctaccctgcctggggagtggagggtggatggggtggggggtaggtcagggtggggtaggaggggtgagggtgaagggagggagagggagagggaaagggagagggagaaggggctgacatgtgaaacaagcttgttcctaatttgaactcatttttaaaaattacaaaaagctctctctctctctctctctctctctctctctctctctctctcacacacacacacacacacacacacacacacgcgcgcacacacacacatacacacacacacacatacacacacacacacacacacaaaaagacaaggtctgtctgtgtagtcctagctggtccagaactgaccatgtagaccagactggtttcaaacttgtgtaaattcacccattcttgcatctaaagttctgggattttaggtgtgcaccactgtacctggctaagttttaggctttctaacgccaatggatgatcataggtatttagagaaagttaaaccataatatggcaagatagtagtggcaaatgagaccagactaaatttaattaatgtggcctattctgaggcatgttgcctttctagtctatccattctgtgagtcaaacatttgtttgcaataagaaaattaagtttacttgttcaaaacataagttccaacatacttatttaatgggattattaaattctagactttataacctcaaatttattcacagtaggaattattggaatacttttccaagttgtctaggagaatcacattggttccgatgtaatttggctgttctagtccaagtttgggatgcttatattatcacccactgtactttatgcttttatatccagggccttaccccttgggagacagcttattgtatcagtgatctgcagtggattgtgggtactgagaatacttcagttactatttagagagcagttctcttctgtggcggttagctttgtcaacttgatcagattaagaaatacccaggggagctagtgaaatggctcaataagtaaaggcatttgcccccaagtgtgatgacttaagttcaatccttgggacacatggtgaaaagacagaactaactcccatatgttctcctctgacctccacatgtatactgtggcatgggtacacacacacacacacacacacacacacacacacacactacacacacacacactacaccccatacacacacacacacacacacacactacacccccccacacacactacaccccatacacaccacactctctctctctctctctctctctctctctctctctctctcacacacacacacacatcacacacacacacacaacacacactacaccccatacacaccacacacactctctctcacacacacacacacacacacacacacactcacacacacgtataccacactacaccccccaacaccacacacacacacacactctctctctccctctcacccccccaacatagcagttgggggaaggagagacagagagaaatacagagatacagagagacaaacagagatagagaggaaaaaaaaaaaaaaccttggggattcaggaaagtacgcctctgggcgtgcttgtgatgctttctgaggtaactacatcccaaaagtgttgtaaaatatttgtttaactctgcaaagatgtgtagcatttatttatgttgtagaatatttgtttaactctgcaaagatatgttgcatttgtttaattatgtaaagatgtgttgttatttatcttacttgcctaaggaatctgattggtctaataaaaagctaaatgaccaatagcaagggaggatgtttaggcaggacttccgggcagggagagtaagtaggaagaggaatttaggcttgggaaaaggaagaaagagggaaaacagaaaaggagatgccagagctacaccaagggccagccagccagacacacagaatgaaagaaaggcaaaacacagatgaagagaaataggttgaattaagttaaaagagctaatgggacaagcctaagctaaggctgagcattcataattaataagtctctgtgtctttatttgggagctgggtggtggaaattcaaactacacaaaggctctgacataatcaacagttacgtccttgctgctcagaatctggtgacataatcgggagatggtgaaaggcaggaaggggggctcactgtaggaagcaggtggttggaggtgtgtcattgggagctgtgttttcctggccttttctgttctctctctctctctctctctctctctctctctctctctctctctctcttagatttatttatttattaggtatacagcattctgtccgcaagtatgccaacaagccagaagagggaccagatctcattacggatggttgtgagccatcatgtgggtgctgaactcaggactctggaagagcagctagtgctcttaaccactgaaccatctcttcagccctctcttctgtattccattttctttgctttctgtctccacaaagtgaataacagctttcatgctcctacagccttgatgtcctatctaagcagccatggactaagtcctctgaaaccatgaatcaaaataaaccattcctcttttaagtcagtcctcgagaaacataaccaacacatcttacaggactatttaaaacttgttcatcttttcttaccttctgctcaaaagaattgcctctgtgggtgaaggaatgggaagagaagagggaagggaaattttggtaggtattaaaaataaataaaaatgttaataaaatgaaataaaaagctaaaaaaataattgcctctgtgtcttagtcttttgactttttgatcgtttttatttcattttttaagaccttgtgtagccaaagctcttttggaacacactatgtaaccgaggctctttaaacctgattctccagcctctgcctcccaagtgtgaggatcacaggtatgtaccagctgcccccagattgtttgcagtgtgtgtgtgtgtgtgtgtgtgtgtgtgtgtgtgtgtgtgtgtgtgtgtagttttgtgtagtcccaagctaaattgagaagccctccattgtggggaagaagttaaggaacctgaggcaacactgctaaaaaggagtccatttcatagtcagctttgccaggactgcagacagcatcaccttccaaaacaagcagagatcagttgccagtcctgactcttagaagaactgacaacgagactccgaagagttaaggactttacagaaaaaaagtgttcgccactcttgccaaatttcagggtgtcacactcttttatctgctcttctaattttctgctgcgaagctacgggctgcacagctctgcggtcagccagactggattctcacactgtgagcgaagttctcagcaaccctgtgcatccccacccatttcctgcttctctacaagcccccagccaaaaccataatttgattgcccatggaggccttgccaaagacccatttcccaagggaggctgtgcagagccctgttccacgagcttgtaaataagggcgctgtagagcaaatgctgtgctgaaaataatatgagaaactctgaattacatgaaagggttcatttgtcttgggacattccagggcttcagtgtgttaatgcacattgcaacttgcaaaagagaagcggtattcatatttcccaagtgtgtactaccatggcggactactctgtggtatgtgagtgttaatttaagaattttcagtgaagccaaaaacggttcagaaaatgttggcccaggaacattctccaactttatcttgagatacatccttgcacgcccaactgtggcacactgaggaagggggaagggatagaagccaagtctcccttctgcttttacaccgcagtcaagggcctgctcccagacttagagccctgagtaggttctgaccccagtggccccctccctgcacaccctgagtgtggaactttagattcgctcctttgaccccacaagtcttcccaatttaaccacctgatgagagaaatgggaagacagacagacaaggcagtgtgaactgtatcacttgtaatcaccacctgcatttactatgcaattcttattttcccaccccaggctttttcatcccaccctctttttaaataattaaaattagttttgaaacgttcatacacgtatataatgaaatatgatcatatcacccttccttccctccagctcactccagatccctctggatacaaccttctcccaacttgtcctcctcatcattggctacctcctcctctccctcctcccctccccctcctcctcctgctttcttctccttctcccattaggtccagttagtgctgtccatatgtgcatggtacaggagcatggacaatctattagtggccacttcctctagggtgagtgattcttcctccatcagtgtgttattgagctaatggattcgtagcttcatgtacagatagcctctgacctaacagtggtataatttgcaatttgtaaacttactatgtcacaaagtgatacgtacttagtagaaaatgtacttgaaattttgatcttttcccaagctaacaatacacacccaacaatattctcttgccatatctggcaacagcattggttcttagttttctggccagccacacgatcacaggggctaaccaccaatggtctatggtcactctgttggcagtattttttacaatgttgcatttcatactggttcttttttcattttgtcatgtccataaaatgcctatcatgtgtgaacctgaatttttgacacttttgttagcaatatgcttgtcttagatggtcctgcccaatgtcaatgctctgagcagattcaaggtaagctaggctaagaggtgatattctataggttgggtgtgttaagtatttcaccatctaaacaatttttattttatgagtgtgtgtgtcacatgtatgtaggtatcttcagaggcataggccagaagagggcaccgatcccctggagctggaggtagaggtgattgtgagctacccagtgtgggtgctgggagctgaacttgggtcttctgtaagagcagcaagtgttcctaaccacattgggccattttccagcccctaaacagatttttagtatacttctagtttgtgatagatttatcagagtgtgactatatcgtaagccaagggacatctatactatatcatcctgtttaatttctgctatagctttaggagatacattctattattcacattttaccctcaagaaagcagtttgtctacagtcacctgatactaacgtctctgggattggatctgtgtaccacccaccatttagccatagtcttctagtcacccccagggctgtgccctgtctttaaagttttggaagtttaaggaagtacatttccagattgtcaaccttcttcactgagaatttctgccctagtttgtagacctgggttccccatgtcccttccccatttacatctgggtacattgctccaagatgtaaaatccgaaagttctggacaaaggcagagggttttggaccggccaggaaggtaccacaaaccctcaattttcttgtccttctggcttactttaatgttctagagaaggatgctctagaacacacctcataatggagattatgatttggttatgtgaggggttggccttgtggagaaagaaaagtcttgcttactaatcttgtctcactcatctgactactaaagagagcctctaaaaacaaaatagagactaccatcaagaaacacagaatgctaaaattagacttcttatgaaatttaaatttatattttttctcagctatttttgaagtttgcttcccagtgacaccagtgcctttaaatgtaacggggatcttttccaagaaacactagcagaaaaattcgcaggaaaaagtttcatgtggctttgtttttcagaagtggtgcttaaacctgtattctaaaatcatgttatgaaatattcattctagttacaaccagtgtttatgtcatcttataaaaattttaaataagttttaagtcatttaataaaaaaattatgtgtaaatgtctttataaaattgatacaatatttattttattgtgattatcatatttaacaatcatgtacaaagatgcaatccaattttttaaaagataactaacatctgatgtatcagaaaatttaaaaattagattaaattttttttgacgaatacatttttttattgaagctataatggggttagtcaagaagttcagtcattaaatatatcaagacagatatttttggtatgtgtttggtggctggggtgtcaggggagcagagtaaattcacgaagtcaaatggaagaaagaaatatgtgccatccatatatttgagaaatgagttttgagtgcatgtggatatcaaatggctattatattatttttcagtagacaatgtaataatcattattaatggaatgtgatggagcatgcctgtcatgccagcactcagaagagagcaggaggaccaagagatcaaggccagcttcagctctgcagagaggacaggagcggggaggggaggggaggggagggaaggagagggaggggaggggaggggaggggagggaggggagggacaagatacagagatagaggcagccagaggataaaaggataatttgtcccttatcaggacatgtgcagcctggcgttggtggcacacgcctttaatcccagcactcgggaggcagaggcaggcagatctctgtgagttcgagaccagcctggtctccagagcgagtgccaggataggctccaaagctacacagagaaaccctgtctcgaaaaacaaacaaacaaaagacatgtgcacacacatacacatatttgagggcactgcaatgataaattttaggccatgaacttttcaccaaaaaagaagaaaagttggggaaggaggagtattggtagagcatggcttttcatttgggaaagcaccaagatgagaagggaggaaatgtttaaaatgaaacagggattctggtcctcacaagctgcaggccatccctgaggaggccccaaaagactagaaagatgactgcacaggcccagagctgtcagggtctctgtaagcagttaaaatgcatatagttaacaaggaaggagaagggagggaaaggggaagggagggggaggggagaggggggaaggaggaggaggagtgaactgacattggatgaaacaaaactgcttcagcactaaaaagggaaaggatgttaacagtaaacggcagccaagataaacagaactcccaatgtttttgttttgtttttttattttattttatttttttattaaaactataacttactgggaatttaattctgattttacaagttcaaattatccctctgccttcaaaccattttgaaaagacatttgcctatggtgacatttagtgcacttcagactatcaaaaaacaatggccatttcagacgtgacagcccaaattacaattcatagattcaaaggacccaattaacaagcaactggtctaccaaaattgcttgtaaatgcaagtcagtgggaatttggagggagctggaaagggattcttgtgagttgaaaagtctgttattaagtaaaattccaagttcagatgaattggttttgaggctagtaaacttgctgttaccattttggattaaatctggagtgggctttatgtggactcagtaaagacagagctgtggatcaaagtgagtttctggatttattactattttgaaaaagaagagaattgatggctgctgggatcttgaagaagcaaaacaggaactagagagaaatatctaactggcccatggcacagagagaatcttgttagtggttttttttttttttttttttttggttttcctttgggtttttcattgtcgttaaatattgatgatatcagcttacctagtcctattgtatccactaaatattcttaaaaatactacacatctatgcattaccccccagggtcttactatgtagtccaggctgacttggaattaacccatatgatctttgaatgagtaattctcttgagtgcttctgagtgcttagattataggcatgcacccctatccctggctatttgtatgtatcttgaaaacatcaacatagcttataaaatgtatgtatcagagctggggagatggcatgagaacatgagttcagatccctagcacccatgtaaaagctatgatattggcatgacacatatacaaacatgtacacaccccatatatatacacatactatttaaacattatgaagagttaaaataaattgctgtataaaaaagtaacattatagaaatactattctgtttctttattattcctactaatttaccatcttttctagttttattaaaagaagactgggaaagttagattaaggtgggtcctagagtagggaaagactttaccatgacatgacaagtgatcatgtgacctaagctgtccatcaaaaaatgatgttatctgattcaccgaaccatgcgtgtcacactacaaaccacggcagccttcctgtaactgttagtgatcaagctggagcccgtgtggaaggcgtgatcaagtcccatgagccagcggccggatcctcctaactcctcctacagacagggctgcttggatgctggtccagcctgagtgggctgtcacagactctctgcccactcggagcatccctaagtgacagtgaggaaaagaccttcccaggacgtacgagccttgtcagtacacccggctgtgctcagtgacatgcactcaacaaggctgactcaggtccccgccaccgttaagagtctacagtgagtgttaagcagacaaccaacctgagtctgaatgtgtcacactgttggggacaaagggagatggccagcctgggcatagggctgacctgcggttgcctcccctggaattcatgttgaagtcatagctccaattatatcagaaagtggcaggtccgggaggtgtgtcttttagagttaaaacaaggccattagagtggatctgaaccctgcctctgcctcccaagtgctgggattaaagctttgtgccaccaccgcccagctcctgatgcacctgtaagatgaaactgagtgggcaagattgttgagtaggtaaagcactcactgccagggccgatgacctacgattggttcctgggaaggggagaactgacatctacagattgtcttctagcgtccacatgtgtgctgtggtatacacatacgccccaccacaaagtgtttttaaacaagaagaaatttacacacattcagagggacacaacaccaggtgaagacagagagagaagagaggcctttccaagctgggagagttttgtgctggttgctttattatcaccctgacacaagttagagtcatctggggagaggaaacctccactgaggaattgccgccatcaagtctgtggtacgttttcttggttacagtgccagtaagtggcgttcctctacttctgttcgtctttccaagttcctgccttgacttccctcactgaaggcttgtgaactgcaaggcaaaataaataaataaataaataaataaataaataaataaaataaaataaaataaaatcccaagccgcttccaccacagcaatagaaagcaaatgaagacagggcccgctcaaggaactcgtgatgcttttttgtctccaccttgaacttctagcctctagaactgtgggaagacagaatctcagtctgtggcattttgttacagccgcccagtctgtggcattttgttacagccgcccagtctgtggcattttgttactgcagctcaaggaaaccaatacataccttttccttcgtggtaggcaaaacaatgtattctcgggatagttctgggcgtgggttaatctcctgtgactacagtgctcctgccctaatctgactggtggccaatggaataagcaaagacttaaagatggctcccgtctcccacaacctgctgcatcacatcctctccctctgcagaggccacactgcaacctggtgaagaagacgctgtgtcacctggacacttcagactgatggaaacgaatgggaattttatttccttgcccgagagctaaaagcagctgctgtgatcacagtcattgcctccctacaggggtgagccaggattgtcatagacccaaagagtttccagaggaaggtacagccctgggctgctaaaaccccatcccctgtttttaaaaaagtggggttcctcccattaaatttgtgtgtgtgggtgggtggaatcacacacacacacacacacacacacacacacacacacacacacacgaggtcagaggataattttcaggagttggtcctctccttccaccatgtaggtcctggggatcaaactcaggtcaccaggcttggcagcacaggccggtacctgatgtcccttttgttctcccaggataggaaggcctgctaatggcctcctgctgttgctatttcggagtttcttcttcatcttccatcacactactttcttccaccataaaaccaattttgtgtggaaagtttgtgaggtacacatcagagaaggatactcagacaagggttcaggctgctaggaagtctctattagctggccgtcaacaacactaggtgtttgggaccccagtgcaatccagagcctatctgagggtgggattttaagcacacaagaaacacttcatccttggttaacatacttcagttagcaagagcagttaaccatcattggaactatagacgccaaaatgctagtacatttatggtctttcccagagctatgaactttgatgggttaggtctttgttttcattttgacagttatttctttcttggtgctgggttccaaggcctgagtgattcttctgtcacagtggcagttgtgctgggggcccactaaggtctggcgcctggtacactatttataaattagtttaaatgttctgaatggcttctgccctcctgtcagaccttgactgcgtcggtgcccttaaaggctgtgatactctgcatcctatctgcctgtccagagtcatgtcacatcactgtgatcagtgtgttccacttgccttccgtgtttcttttcctttccgtttctgggatgggttagtgtccccctcctggccaaggaccttggcacatgctgttagttagaaagtgtgaaggacctctctccctgtcagctaactccccttaatcataaaatctgtttgcaaatgccactctctccaagaagacgtgcctgacctctccccaaacaccccaccacagctactcacagaactacacgtgaggcggacccctcagcattcagtaaggtcacgtgtaatgaactgatttcctctcattgaattaaattgtaaatgagatccatgacctaaggccacactttttaagtcaccattttatttccagcatacacagagcctgccggatacatacaaaaagcgatgtgtttgttggatgagtaaggggatgggccctgttttttccccggagcataagttcttaaccttcattgcacagtctaagcaatgaggaattttaaaagttctgttcgctttttaactgaagtgtggacggaatgtcgggacttttgaaagcttgcaggataattctgacatgcagcaggcttgtagacaaaatgccagaacatatgcaggtggaatgtctatgtgtgacatttatatatccacacagtgggtggctccatgttcagtgagtggctttttccccctagtatttagacagattcctctttcaaccccttttattcctattcggtttctctgagggctatggaaggctgccttctgcttgcttagatgaaataatttctgagatactttacaagtttgataacttaatttttttaataaaaaaatcctttctgttgctgtcaagttaaaaaaaaagtgagggtgttaaggctttatgttttgggtggaagaaatatctttggccttagaatccatgctctgactttgatccaatacctcttgacattctacagtccttgtagaaaaatctcagtgtatcaaaattccaatcacatgaccctgccaggctccctccccatcaggaggccaccttaatggggcttccagcaggccccctccaatggcacctcctgaggtttcccagcagtgcactgcctggcatcagcgatgactcactcagtcgctctgtgaggtcagtctatcgctctataagcctccttctgtcggtgaaatcccactgaagcagagggggcaaatcttcctggaagccagctggttaatgcaaactgattttgcctgtggactcaattgagtggaggccagttgattactattataattttgttaaaacacagaggtacatggcggaggaccttgaagcactcctggcttgctctgtctgtctctgatgcctctggaaaggtcagggtcaggcccaagcacaggctctcagcaacttctttaaagcccagtagatctgagaaaagagttcttactcactgtgttgtctgcaagcacgtgccaataggaacgttctggagccctgctctaactcatttgtgttgataagcagtggcacattgatgccgcctttaaaacccacagctccttttgggagattttatcaccaccccctcctttgagagtataactgacttcttgctgcaatgtgtgtgtgtgcatgtttgtgtgtcggggttcatgcactcgcgtgagcatgggcgtgtgcctgcatgcctatgtgtacatgagtatgcttacgtacatggaagtgtgtggcattctgtagtgtgtatgtatgcatgtatgcataaatgtgtatgcatgtgtgtgtgtgtatgtgggtatgtgacatcctattgcatgtttatgcatgtgggtatgtaatgtacatgcatgcgtgtgtatctatgtgcatgtgtgtttctgtgtgtatgtgatgcccatactgtggatgtacgtgtatttctgtgcatgcatatatgtttatgtatgtatatatatatatatatatatatatatatatatatatatatgtgtgtgtgtatgttcatgcatgtacacaaaactccacagtgtatgtaaatgtgtgtacatgagtgtgcatgtgtgaatgtgtgtggagggtgacatcacttgtcacccactcagaacaggcgcagtgactctggactgctatggaaccaagtgactccagtgtccctccaaggacatgcactgtgagccctgaatgaaccagacccacacctgtggctcccgttctagggctcccaggacaggtggaggggaaagctgggaagcacacatgcttgcgattttctatctcctcagtctctctcttaaagtgcatgtggggttaggaaactcccttctgctgacctcttcatggccgatgcctcctgtcagtaaggctattagctttcttcacagggcatcgaaacgccattttcctctctggagtgacctaccggcacaccctctctaatggagtgtggttttaaatgtgctgacataaagcaagctgccttgagcacagacaagtctttcctgtttcctctgttgactggagagttgtaactcttggctttggagttcaactcctgtcacttgtatttttgaaacattcgtttttgctctgatagactttcccgtgatcacccgtgtcctctgcctttctcctaagcgagttgagatgggcatttggctctatgctcctctattctcgtgtctggttttctaaagttatgtgctggctgaggaagcacccagagcaacttggagatgagcctggagaagaggttagtgtgagccattggggaagaccgatgtcagcagaatgtagatgccacagcttcaaagtcacaggtttagaggtcaagatcagaggatgagggcaccagtctggaacaaaaagtttgtaactgtcacccacaagttgcttcatagaatttggagactattagagaagcccagccccagtatttgtgtcaattacttagttgtccctattttctggtcttggaagaccctagttgctgataaaattattaaattacatggcactggccagtgctcgatggtttcgttgccaaccttgtgagatattttgtcctctgggactctcccaagtgtgctgaaggctgcaaccaatgcccatctgtctactagggaccgttcaccaggaagccccttagccacgctgacaagctggctgcaagacttgtgttcctagaggaggaggcttgagccaagccaccgttggccaagcttgcagaagtctctagagcagaacctagaaattgaaatgacgttgttttacgaaggcattgatcttcttttagttaactaatgaatagctgtttcaaagaattttccttgtaccttcctcttcccttcagtccagctgagctgcatttgacttgggtccatgttttgttctatttttgcctgttgttagttgtgagggaggagggtacggtgaagagcaagctctagaggcatgaagtataacacaaaagaaagcttcctccctgactgaaggattcgtgaaacacagaaagcatgtgggtttcccatgatctcagtgacccgaatggtgcataaaggcttgtccaagtgtgactgggggacatagatcctctcatgtctctgctctgtggctcacttctttctgggaagtgactgattttctgctttctaataagttacttctatttctacgactctccacgtgtccacggtacaatccttgtgctcagaccaaagaacccagagatctcagtagcctccctccagactctgttccatggttatagtagtacaccattgtgtatcacgctaataacagacaagtagcacttaagtttattgattttaagtgtctagcccatcttcttctacaagagtttcagatggtgtcttcatcagctcaggctgctacaactaatttccagaacatggattccaggggtctgaactctagttctcatgcttgcaggtcaaacactttatctatggaacaatctccccagtccttgccatgtgtttttctaaagcttgtaatcaccagggatacttaattcccagttgctggttcaattgacctctgcattctagaacaatttagacactgtatagcacaatgctgagtatatgttaggagttcaataacagttttttaaagatttattcattttatatgtatgagtgctctatctgcatgtactcctccattccagaagagggcaccagatctcattacagatggttgtgagccaccatgtggttgctgggaattgaactcaggacctctggaagagcagccaatgctcttaaccactgaaccatctctccagccccaataacagtttttttttgttgttgttttttgtttttttttttaaagcacaaacagtgacttgtctctgctacctcatataaatcatcactggaactggttgaggtcatgttgttagtatgatgtccaagttatactggggactctcaccttcagttagacacagtcccctgcagaacctctggccatggtgttcttcctcccagcactcagcttgtgctttccatgccatctcattcccagaatccctctcttggctcatggactctaagatgactaacccccaaggtattacctgccatgtcagcaacctggtagctatgtttgactcctgtagctgctctggaaagtcaccctaacagagatctgtctgaggccccagacatctgagcaatgcccatgtaatacaagttgcctgttagaatcaagcccgaagactctggggcccaagcatcacatgggaagaaggcttaaggcagtttttgcagagcaccggagccacatgttatgcatggagtcagtgtagacagagtgggtggcaagcgctaggaacagcattctccagtgctggcggactcccttgatggaggtcatttccagaggtctggacacttccaatcaaaggtcacatcaaatgcactcaccgagagcatatgggggtcacatcccctggaggaggctgcaggaggccagagtcagcagctgtgaaaaggctcaaaggccaaagagctacaaatctacttactacagtgtgcgatgcctggtccctttgcatgacccttcttgtctccaattctaagacaatgttaggatgaaaataatttaaagtttttgtttatttccgtgtgtgtgtgtgtgtgtgtgtgtgtgtgtgtgtgtgtgtgtgtatgtgtgtgtgtgtgtgtgtgtgtgtgtgtgttttgcatgtgtgtggatagaggtgcctgtagaggccagatgcatcagatgcccctcaagctggagttacaggcagttgtgagcctccgcacattggtgctgggaactgaacttgggtcttctgcaaaagcaatgtgtgttcttgacctctgagccatctcttctgactcagggtgaaaataattaaacaaagaatacttgattatcaagaatcatggtctttctgccaggaatgtcaaggagacacagcctggcactgccacagtagcgtgaggagtcttgctcctaggacttctactcaggtaaagccagacctttgtcaatgatgccactgcagagcagaatttcagaacaagtctgagttctgaatgagtcctgaaagaaagacatttagcagacagacgtttatctttatgcctggtgggatacactaagaattcaaacacattaaggggcccagggagatggggagatgggcagatggctcagtaggtaaagcacttgcctcataaacacgaagacctgagtctggattcccagagcccacacacggccagtgcggtagcatgcatctgtcatcacaatgagatgaggctggagaatccccggaagctcgagagccagctagccttgtgtgctggtagaaaacaacaaagaagacttgcctcgagtaaagtggaagtcaaggactgaaccaggatgtcttctgatctttatatgcacagtgtgtcgtgtgccagcagtcacacacagacatgtgtgcaaaaggattttaaaaagagacttcagaagacaccattcccacattaacagttaaatcatcattggaatcattttagactacataattaggactggagagatggctcaggcattaaaggccaggctcacaaccaagaagacgtaagactacattattagcatggcatttatttatttacttatttttaatatgtttttaattgtaatagagttacatccttccccccttaacctcctccagcccctcccagctacccttcctcaaacccctcccatgtcccccaactctcaagttgatagcctctttttctttggttattcttgttacacgcataatatgtatgtacatatatgtatgggtatgcacaaataaatatgtataaatacaacctgttgagtctgtttttgttggtggtgtgtgtatggtttcaaggctgaccactctgaactggacaaccaagaaggggcccatccctgggggaaactgatttccttttcccagaagtcagtgttgcctgtggtccttcatctaggagtggggcccatgaaatgtttcgtttccacgttagcatatccattgatatcgccattgctctggccttttagttagcaccatgtttaaatagagatgatcttaatgtagatttaacaagaggctttacagaggagagagacagagagagacagagagagagagagagagagagagagagagagagagagagagagagagaggctgtgtttttctaagttacattgtttaaaacacactggagacctgtgagggtcacactcacatatctttacaatggaggtgtgtgtgtgtgtacacgtgtgaatgtaagagagagagaaagaaaggctatgcttttctgagtgacattgtttaaaagatataattttcaacaaggtttaaagattaatcaaagttttaaatttaagcaaagtttataaataaagtaaaaatacattagttttacttattttacttaaggacttttcttttgttaatgacaactgtggggtggctttgtgagatgtgtggttttggctttagattcacagtgacaacaagttaaatgcaaggctataggcattctggcccccagtcaggaaagtttgctttttagtaccctcgttggaaatgtctttagggaagcgagcattagctttgtaggcaatcttggttttatcagttgtgttgaaatttcttgagtctaagccagcagaaaatacaaactaaacatcagggtgaggatattgtccctttcccatgtccccttaattttcactgcctttctgtcttgtctcagttccaggaactgagatggggtgtgggtgggcttacccacactgacaaggtgtaggcagaaatgacacacagaatacagggccccaggagtcagaaacggggctcagaaatggaaattgcttcatgggaacaaaacataattttgtctcatctgtggggacaagaaggagcaagagccgtgttgaatatatgactgtaccactggagccagtactgtatggttggctacatggctgtggcttgcaacatgcaaagggagtgtattagttcctctgtcattgcagtggcaaaatccctaacagaaacagcacagagaggaaagatttgtggtaactcgaagttgcaagggtttttaatctgttgcagtagggaagacatggtggggcggaaacatctcacagcagcgggagcaaatggaggccgctgttcatctagagcctcgggaatgctgggcaagagctctacctctaagctgtgtcgccagccctacttgctgtcctttacatttccttccagatgcttgtggccttgggcctttgagtcagctgttggaagaggcctttgggttcatctgctttagaaagaacagggacaaagtttccagcagcacagccaggactgtccccctgtcagtgtgacaaaatactgaagtttctttctttgagtcacggaggattttccttgcccgggatttaacaaaggacaatggcctgctcacttgtgcctggggctctgtccatatttgtaagaagatggcaggatgagggctgggatgtaactcggttggtagagtgcttgcctcgcctgcatgaggctctggattcaatccccagcgctgactaaaaaccagcactaaggggtatgcctgcaatcccagcacttgtgaggcagaagaaggaataatcagaagttccgggttttccttggctatgtagtaaggctagtactggttacgtgaggccccgtcttaaaagaaaaaaccaagtttgttgaggggctcaggagtggattgtagactgaaaaccatgtgtttgtgtatttgctgtttggcagatgggctcacagtgtacagggagaactaatatgagtctgagaagctctgaactcgtgtgtgtgtgtgtgtgtgtgtgtgtgtgtgtgtgtgtgtgtgtgtggtccccagatgaaaggtttctgtcaaggcagaacccaaaggaatgataataaacagtttggagggataggctttggctctccaaatgtcactgatcaaggccttgtcatcgtcccactccctcattggtataaataatcaaatgactccgctgtgggatattattttaaccaggcagagatgtgttacatttgtttatgctgtggactatctaattgtgtaaaggtgtgttacatttgtttatgttgtggactatttaactatgtaaaggtgtgttacatttgtttacgaaacatttgtttaacaatgtaaggatgtgtgtttaattatgtaaagatgtgtcatttgtttcaccttgcctgcctaaggtacctgattggtctaataaaaagctgaacagccaatagctaaacaggagaaacgatggcgggctagccggcaaagaataaataggagggatctaaagagatgaataaaaggaagaggaggaaagatggaggagaaagagagggccagccgtgggcagccaggcagccaggctctggaaacagggaagttaagacatacagaaggaaggaaggggaaaatctccaaggcaaaagatagataaggagaaacagattaatttaagttaaaagagctagccagaaatgagcctgagctaggctgagcattcataactaataagaagtctctgtctcataatttgggagttggtcgatggcccaaaagaagaggaccggtacagactccagtgagaaaccacagcaaatattgtagaaagcaatgtgaatgtaaaattctgcacggtaaagatttctagaatgttctcttcttgtaagttagtgtcattagctaatattgttggctagttctttatatgtgagtgccagaaatgagagggatctagaaacttctggggttaggagtcagaaagaaggtcttctaaatcacctttcttccttaggttcagaactagacaagtttccccagagggaaatacatgctattttcaatgttttaaaaaaagttgtgtatgtgtacctctctctctctctctctctctctctctctctctctctctctgtctctctgagtgtgtgtgtctgtgtgaatgtgtatgcatgtactctcacatgcacaaagactagaggacaaccttaggtccatttctcagctaccatccacattttaaaaccgcaacaacagcaaacaccaccagcaacagactaaagcttcttataggcttggacatctcgtcagtctaggctggctggcccagggatccacatgtccctggctcccccaagccaggattacaggcatgtgccaccaagcccaactttttatgtaggtactagggatcaaactcaggtcctccatcaagcatgccatacgccccaattttcagtgcttttgagcagccctggtacttgaagcttgaatgactaggttaagctctgttcctctatttttccctctttcagctcttaggtagagcttattttcattgtgaatctccaagaagaacgaaatactgattaatgacaacttccacatggctcgattcattgtttctgctttttagcaggtcccagtaactcaagccttccactagaccagtctacccacttgtcactctgtttgtgtagctgctggatctagggaccatggcattgtgcatgaggttagcattgctaatagctcaaagtcatgacattcttggtatttaggtctagttttaagggtcatttggtaataactcacctctggggcttgggaagtgactcaggtagggtcattgtcctcatggagcatatgacctggccactgttgatactatccttgtctctggacacaagcatgtatcatattctggagcagtctctgatctatatgtgatcacagcatcttttgctggctctcctgaattcagagatgccatcaggagagttttctgttgaccctccctcgttagtgcggacgaggcccaagactttccttcctattccaaggttaaagttttcccagatttcaccaggggctcagtttttgagtggcccaagtgggaagttcccgtctatgtcagctgactttcacttgggtaggatcttgaccaaggaagcaagaagaagcctctcttgtgtcaccatctataaccacagtgtgccttgaaacttgaatccaacttgctatgtagaagccctgaatagtaggtctgaccctgctcaaaccccaataaaatggtgaggaggcaccagggaccccaggtagattgatggcagcaacccagctgtcagtctcctgtcatgcaggcacccacctgctgtttctctccatctaatctcagctttgatctcagttttcagaggaaagttcctgggacatctccatttcttcttcctctggggcaggagttgaggggacagtcttctctatgacactaatgatcagttattgatcacagacatgccttaaaaccatagcactatttctattagcaaagtctgagaagtgtttaaataccaatccagttaagttgaaaagctataaagtaaaataatatacagccatttaaaagcctggagtcagtgtttagacaaggtatgggaaagtatcattgttacagtgttaaaattaaaaggtcttgtaacagtgtatagtaagatcccattttgagaaatttgtgaatcaatacatggtggagctgtgtctattgatagggaatgtccttctgtatatatatttctcttattggttaatgaataaattactcattggtcaatagccaggtagaaagcataggtggagctaccagaccagtaggaggagaacagagatagacagccaaggagagacgccttgtagagcctgggaagacaggattgccaggcattctatggtaagataaggccatgtagaaatacatagattaatagttatggtttagtaattaagagagagctagctagccagtaagtagtcctaaccactggttaacagtttataaattaatataagtctctgtgtgtttatttggggcaaagcatctgtgggaccaggcaggacagaaacctccatcttcagtctatggtgactatctttctctgtatgagaaaaagatttacaaaagacatagttaatctgtgtggtataatgccacatcgattggaattgtaataaagtaataaatacctttctgatgaaaacactccgtccatcttaaattatactcagctctggactctggacaattcatgccttgttagtgagtaaagggtgctctagcccacaccttctacccagagagtctttctttctttctttctttctttctttctttctttctttctttctttccttccttccttccttccttccttcttccttcctttctccttttccctcctctccccctctccctccttctctttctcagttaagatttttggcttgaagcaaacaaaaactcacctcaagtgagaaacggacttgttggaaagactctaacagaagagttaaacactggcctcagtgagtctggaatgaggtccactgacagagtctccacctgagctagcagggctcaggtgcaacagacttcaagccactctgtgcctggacaggagtcagatccttgggaaagggagtctgcccggtctccgcaaacatggggcaaatgtgtcatcatagacttcgaataccaccatgccaaaatagtactatgcaactggtgctaattagttcataatccttaaaactgtgtcactggcctcattaatgctgtttgaaccaatgaagccagttagctgaattcccataactccctgctccttacttggcatgttgtatgtgctcaataaatattgagttgagtcagcacctcacagcaaggccttgaagtcttggaattagaaagtgttgctgtagttttcttgtccagccagatcctactgcttcaaccccaaatgaacacacagagacgctatattaattattaaactgttggctgacagctagggcttcttattggctagctttgtcttaatcattaacccataactactaatctatgtatttctacatggccttatcttacctgagaacacctggcacgtcctatttcccggtctctacatggtgttcttcgaagcatctctctgcctacctttcccagaattctcctaccccccctatatgtcctgcctctattggccaaacagtgttttattcatcaaccaataagagaaacgtatatacagaaggacatcccccatcaggaaagggtttgctactaactacttttggttatgggtaaattgggtcctatataaaatatgaatcaccattctagtttcatttttgttgctgtgatagaataccatgaccaaaacaagacaaaagaacttaagcaagaaaaggggtttgtttctgctttcaattccatcattgtggggcagtcaatgcaggaactttaaccagctagttacctcatattcacagtcaagagcacagagaaataagtgtctacatgcttgcttgcttacttgcactcaccgccatttctctgagagctcttgtttagttctggacctcctgcctagggaacgaatggtaccgcccatagtggctggatcttacaatctcaattaactgaattaagagcctcccacagacatgactgaaggccaacccagtgaagacaattcctcactaggactagctcagtcggtgattctagattgtgtctaggcgacagaaagctaaccatctcaatcacctagaagttccttggggactcaggtccctggttcagtgttttgctctttgaataacccaaatgtttcaggtcaatgttcatatgaaaggaaaagaggacctcgccggaaatgtcacactatgagcttgaggacaaaagttctggcagaagcagtcactgctgcccactcacgaagcctatgaactgctaaaagctattttctgtgtgggtttcattctagtctttcaccaggcaggaattccttgaccggacagcttgccccaagcccgtcccctcacaaccctccaaccctcccattttgacttgtactggcctatgactcacactgcactcaagcaattgggtttctcacctccaccactgaagtctgagagcttccctaattcttcgtaacctgactcagtgggacagagccctgccccaccttccactcactacagcatggtttctagaagccttcccactttgctcgctccggttcctttatgaagtctttgttactccaccatggccagcagagtggcagagcgacaacctgatggggtctagaaggcagttcagttcaacaggactcagtagccggtgttagtttaaactctgtgagtctgaccctgagtagtttactttagccatgtttaagaaccgcacagttcggtggaaattttcatgatgataaatagctcacaatcccatgtgcacaacagagcccaagacgtgactatatcaaaactctttgtaaagtaaggtgacatcttccataaagatggcttctataggttgactgagaaaaacaagctcatggtaagggtggggcatggacctgctgtagtttcagccacacagatagtgagaggtcaccaggctataaaccacgtctgctcccagccttctggctagaaaacaggtctttgaagagacagccctgtgtgttttaacactcctggttcccctggtgcttatctgtgagcacaaggacctccttaccttccatactcctagacttcgtgttggtgacagtgtgcccacccagacacctccatccctcttgctatgctcagcagctttggagtttggattgcctcggtccaagctatctttctgccaacctaaccaagaaaacatctttcctctgctggtcagctcttggctgggtttgcaggggactaagaaaatgaaagaggtgggaataaaagggagggagggagggagggagggaggaattggtttgtaaatagagtttttctcacttccatcaggtgggtgacaggaaagggacctgctgagacaagcgtgagaaaagatgtggtgtcacaatgacctcagaaacactgggccactttccttgcacaagatcatatgtgtctacactctgggttacgattcacttccagaaactgggtctttgagaaaatctcagcattgcagtccaggcgtgagagctacacagccaacccttggtctattaaaaaagctattgtgtttaacattgtcttttcttgtaaacttgagatgaaatcttatatagtccaggatgccctggaacttgctatgtaaccaaggataacctggaacttttgatgctgcagtttcctgctagggtgacaggtgtgtgccaccatgcctcattgtatgtgttcctggggagggaacccaaggctttgattattccaggcaagcactctaccaaccgagtcacacccctggcccctgtctaacactatcttaaggtggaaagtgaaacagttttcttcagtgacaggagtcaaacttgtgccctgtgagtcctcacaaatcttctaagtcaggtgttcaagaaaggctggattgtagccgggcgttggtggcgcacgcctttaatcccagcacttgggagacagaggcaggtggagctctgtgagttcgagaccagcctggtctacaagagctagttccaggacagcctccaaagccacagagaaaccctgtcttgaaaaaccaaaaaaaaaaaaaaaaagctggattgtgagctgacacctttttttttttttagatggggggtggggtccttaatatgcagccctggatggcccagaactcacaaagatctgcctgctcctgtctcccaaatgctgggatcagaagcctgctccaccatacctggtggagcttttagagctttttactgtttgcttttagaaagtactggtgctgaccagtacaagtacaagctttcttctgacttcgtcatgatcattgacaaattagtgaactctccactctctgattacggttgcttgttttgctctgtggtcaatgctgagtctgagtgtctttgaaacatgatgataactgtcccaaggagcacttattgtgagagagacacaggggtgtgctaatcagcagccaggtgaaactaagaacaaggttctgatctgtgttgatgcaaaaaatactctcaccacagccaagctacagaagagctgagaatcaaaattaaaggagggagggagggagggagggagggggagaatggggctgaaaaccttcccccacaccagtcctgcacactgtatacatttcacagatgtctctttcagttctcaatacatccctgcatggtgttgaatgacatttttggggggacaaacatctgttcactccagattgggcaccaacaacagaccaaagaaacagttcttctggagtaagccctggcctcactggagtgagttacttacagcagtgtgggcagctgaaacctctcaaagcctggatcacgggagttctcgtataacttgcaggcagcttgggagattcttgtaactttctggtgagcccctccgtcttccctgtgagagaagtttcaattcagaagtatctacatcattggtaccaacccgagctacagattccagattaaaaattaaaaccccccaaaacaacaaacaaacaaacaaacaaacaaacaaactggaagttctgagagattgtatttccccaaaacctcagagcctacaagagtaatgtcaagagtttggaatttaaggccctgcatttcaaatacatactcaccagtgggtgtaaaagactgcaaatccatgcgtttcttttctttatttggaagcacaaagatgagtcctgaacctgtaacttctcatttcttaagttcaacacacacacacacacacacacacacacacacacacacacacacacacacacacacacacacacacatacacacacacacatacacacacacatacacacacacacatacacacacacacatacacacacacacatacacacacacacatcacacacacatacacacacacatacacacacacacacatacacacacacacatacacacacacacatacacacacacacatacacacacatacatacacacacacactcacacacacatacacatacacatacacatacacatacacacacacatacacacacacacatacacacacacacatacacatacacacacacatacatacacacacacacactcacacacacacatacacacacacatacacacacatacatacatacaacacacacacatacacacacacacacacacacacacacacacacacacattctgccttcctatagactggtgggagtttaacatagttactcacaaacaaaaccaaaatcaaagcaacattgacagaaacattcttttaactagactgatcagacactcatgcatgcagagagtgtttctgttgtcacataaagttttagcccctctttcatagtgtgaagagggaactgctctttctggtggttgtgtctttctatgaaagtcaagtgtgttatgcacagcctgaaacagacacatatgtttagaaaatgaattcgcaaaaggtcaaaaagataagtggccttcctcaagcttgtgcctccagatggtgcgagcacagggcacagcctggtccataacacatgttggatgtgcctgccttgaagttcagaggacatctgaacaagcctatatgctctggaaaacacggccacagcagagtaattcctaagaagcatacacccaaaagggaagtcaagagctacctcctctcagatgaacttctctcttcctgtctccagtgttttcacttggtaattctttaggccagtggtaaagggcacacttaggtgttagacatgagtgagagtttggggacatactgtgattctctaaggcctagttttccccagctgcttttctggactgtaaccagagctggtgctcacaactgttcatccgtttccactctgtggccccaggcttcagcatttgcttttgatgagcagttcccatgacaaccagaacagcctctccagtctgccaccccctaactgctgagatgaaaaggggaaggagatataaggtaagagacgctcttctcaacacatgagtttaaacgtagttgcaagttaaacactgataattataataacaacatccaaagtgagtgaccaacattcacctcttctcttatggtaaatagtgctctcttctctggcatcggtctgagaacttcttctcttcttcttgttaattgagtcaaagtcctagaagccaatggtctaaaatcattcctcagcctggaagttagggttatacaaaagggcatgggcccttctgatggaaagaccagagaatcaaaaacgtgagattctcaaacagaacgaattgcattctatcagttacccagccttccaagcttgtttcatctttcctgacatcttcacacatcaagatggcgttgactgatgtctgacagcaagatgagcaaggtaacaagttattattgctcacctgagcatacctaatttctggaagattatgacttagtcttccagaagccctaagtcccgaccaccgtgaactcatctctgtctgatttctattccttcattcaatcagttttttgttcacgcttgatgtgccaactatgcaaaaaaaggagtaaaacaaaatcttggagaggtcatatagatattttaacctgtctcatgtgcctttggttgcttagggaactaatccaatctctattaaaccaaatagaaaagtagttaggcttgcaaaaactgaccaaggttgggtatctagctgaaaattagggcatgacagaatagactcagaaaagtacactgttctgagcaaagaagtctgggaaaagtgaagcaggctctctcaccaggtaagaggcactgtggttaaacaacggtgtgggtgagcttgggtcctgtagacgaggctctctgcccttcctgctcctgactctgagtggccatgactgcacgggttaccactccagcagggacaccccagactacactgattctccacagggtttaagagagcatcttagttttatttcctgttgtgacttaaaactctgacaaaagcaatttaagacagaatgtgttttttggctcacaattcccctatcacgtaggggaattcaaggtagcaggaacaaaacagcttggtggcatcacatctatagtcaagagcagaaagccataaagcaatgcatgcatcctagtgacagctcactcactccactctgacaacagttcacaatcgccttcctagggaatggtgccaccctcggtgggcagatcttcccattgcaaagacaataatcaatataatcccacgcagaaaaggctaatccagataattcctcactgagtccgccttctcaggggattctagattgtgtcgagttcacaattaaagctaagcaccccagaaggaggggcactgcaatcttctccttcagttgttattgaaacagggtcttgtgtaccccagactggcctcagacttgctgtatggccaagtctactactacttccaaaatgaaatgattatagctatctattgatatatttggtgctgggtatcaaacatagggctttgggaagataagaattgagctacatccccaggcccatcccaggatgtctgtctgtctatctatctatctatctatctatctatctatctatgtgtgtgtaatatatatatatatatatatatatatatatatatttctttgcagttgtattttgaaagtatttagacgagagtaaaacaaagcgagttgctattgtctcttccgtcttccaacaaggtgacttctgctgctgcttttatttctgcagctggattccaggcaccacgtgaggccatttctttgcagtttttggtattttttatattctggttgttcctttgactttattttcccctgtgtgacataatttccccttgatgtgcatttccggtcatttgaaacagcaacaacacaagcaactggtcatttgtgagaggctgtgtgtgcaaaatctaaacgtggaatattcatttgcactgtgtgaatctgtgtcactgtgaccggtttaataaagaatctgactggccaacagctggagaggtagaggttaggagggacttacggacaaaaaagagagggtgaagaagaagggaggagtctggggagtcaagatgcaaaagaggcaggagatgaacttaacatactgagaaaaggtaccaagccacatggcaatgcatagataagaaatatgggttgggctggagggatggctcagaggttaagagcaccgactgctcttccagaggtcctgagttcagttcccagcaaccacatggtggctcacaaccatccgttatgagatctggtgccttcttctggtgtgcagatatacatgggagcagagtgttgtatacataataaataaataaaaatctttaaaaaaaagaaatatgggttaatttaaaatgtaacagttagctagtaacaagcctgagctatcagctgagcatttataattaataataaatctcaatgtgattatttgggaaatggctggaaggacagaaagtccacctacatttaaaacctaatccttccaagggttgctacttttactcttttgtttatgtatttgtttgtttggatgaataaagtctatttagtatgtggcccctgaattctctactcagctctaaaatctttcaattatttttattcacaaagcaggtttccttcttgttcctcctggatctcaatggctgggtggttaaacaacaagacagaaatttaccttcaacatgtgatccaacaagagcttctgttgtaagagatctatgtgttgagctagtgtgcaaattcaaagcccagacattgtggtttttttttttttgagggggtagaaattttgctctttagccaaagctagactcaaacatataatctccctgcttcagtctcctgattaatagggattataggcatttgctaccatgcctagctccagacaattttcaaatcttgagaattattttttaaatgtgtatcagtatacaaaataacaggtttcacaaccacatttttgtgtatcttctgtatgatacacaaaatataataataataaaacataataatgcacttcagtcattttcacttttacagtctcttgttctcaaccagctggtcccctttctcttctcgtcccctctttctctttcatgctgtggtagtttgaatgtaattggtccccattatctcacaggaagtagtactattaggaggtgtggccttgttggaatggaagtggccttgttggaggaagtgtgtcactgtgggggcgggctttgaggtttcctatgtcaggacaccacccagtgtttcagtcgacttcctgttacctgcaagatatgggactctcagctccagctccagaagcatgtctgcctgcacactgctatgtcccaccatgatgataatggacggaacctctgaaactgtaagtgagccatcccaatttcagggtcttagcccaaccatggaaagctgaactgggtccgaggaagggtaaatgcgctgctcacccatttcgaagcctcccagaatactggagacaatcagacgcagcagggagtctagtcaagcaggaacttgtttattgtcccaccacaagcatcttttaaagaaaaaaaaaaaaaaaaaaaccacagagtggggcaaacagccagccagcagttttaaaggtcagcctgtcatgttcctaggcaccctatgcttcacctagtgaacaggagctgttgaggtagtgacttcatctggttctatctaggcaaccaatcatctcttttttaaacaacccacgacttgcccatctgacttcccctcagcaccatctttgactggctcatgcgccctacaccaattaaatggttttcttcaaagagctgctgtggtcatggtatctcttcacagcaatagaagccctaactaagacatgtcttactgtttttcaagtctagatcctacatgtgagagaagaaacatactatttattctgataactttaaatctttaccttagtttccattttctgtttacacagggctgtggtcagtgccatccggggcttgtgtgtcaagagctttaaccacttagccatctccccagtccccactgtccactaataaccaacccggaaactcatcttttgagtgtctttcagttccacccagcagagtatggtctgtaacacccagtgggcgcgcacacacaaacacacacacacacacacacacacacacacacacacacacacacacacacagagagagaagctgcttcttttcaaagcctggctcagttggcctgatacaagaacagttattgatacaaattataccttggttctttctcatttaatcagtcatgtcatcacatgctaaatcatgttagttatgaaatcctgtggcatgttacctgtaggatggagggaatgtttgttgacaactgacagtttgcagctgttaggcaaaaattccatgatcatatatatagatgtgtacaggattaccaaagaggtgagtgtggattggggagccatgtggggttttgcttgctttgtttgctagactgatgtttctcacatcactggcaaattaatacatataagatattgagttggtaaagccagagctcctggcaaatggatttcccctgtcgagtgaagagaaacactgccaagactcctcgaaagtgcctcagtgttgagtactgggcttaagtgggaatttcctctggggccttccctagagtcctgttcactggcttctcagtgtggtgagtggcaggaagaagccattccagactttggaggagttgtatgctttcctgaacctgttggcattggtagcaccgatactcttgcatctgagcttttcttttctttatccagccccaccactcccatcaggaccatgtttgtggcagatggaatcatcttcgcccagaaagctggaagaccaaagaagaggggagaaagagaaacacactcctccacttttgccctctctccactctgagtcagtcctccaagccaaggtgacaacctgtgagtcagtacagtgagtggcagctgtagtcttggtcttcctgtactgctgtaacaaataccacagctgggacatttcatgatcaatagaaacttagctttacatctcggaaagctggaaacttcaagatcaaggttcttgccgttgacatttggcagggggctgcttgatgagggaggccttaggcacaaaaggtaccaaactcctatgccctcatatatcaaaaggcagatggctaaaaagggacaagtactacatactaacatgacagagggctgaagggaataagtgtactccagcctttatacaagggtcctaaccccattcatgggggcaatgcccatgtgccttagtcaccctcctgaaatctttacttctggatgttatcactgtgtgtttgtgtttccgtggtggaatttgaggtatcacattcagaccttagcaagtataggttgtggctggtgatctgctatggattgaaagtctgtatcattttccaaacagactatggaaacagggtacttagctttagatgaaagcataagggtagggtctcctggatgagatcaacatctccaaagaaagaggaagggttgggaccgctctgtctcctccccctcatccccactctcttcctgcatcccatttccctacccacctctatattccccctccctcccccctctctccctctcccctcccctccctctccccttccctctccccctccccctccctctccctactcctttgcatcaatgaggaaaagctcatgtgtggacatacccaaaaaagccctcccaacaagcctactgacctagtacccgatctcaacgtcaaacctccagaactaggaggaacaaaagcttgtttaagctctctctgtgatattgtctagagcagcccaaactgacaaagacacaatttgagatttaggaaatagtctaagagacatggtttaattgacaaatctatctatctatctttctttctttctttcttcctttctttctttctttctttctttgagacacgttttctctttgtagctctggctgtcctggaactcaccgtgtagttcaagctagcctcaaactcagagatccacctgcctcagcctgctgagtgctggggttaaaggggtgtgccacggcctcccagccagacaaatggttataattttataaatctttattaccacaggggagagttttagaaattagggtcagtagtctagatggtatcaaaggaagaacgcactggaaaaactagaagtgcaagtgaattccacagaccctggcccggaatgcaaagcagatttgggaatttcgatccagaacactccaaaaggcttggctggcaccgttcattcccctcacatctctgccttttgtatttccttcctgtgtcaatctcagatggacagtccaacagcaaaagccaccctaacccccagcttcttggctgagaagaagagaactctgtttgggctggaagatttcctcctctctcagtcgtctgcaaacacatcagctcctcctgttgaccctggaatcagcagccccacacgctctcctcacatcaccctgacgtatgacttcatgacagggaaaacattgcttttggcacacctctgcccccacttgcaggggctcagcggagatctccctcccttcccacccccagtacactcactttcgctgtatttaagcaacgctgccttgggcagagagcagggtgccaggtggtgacaaacactggaggcactgccttgagttttctttgaaaacgtgtctctggtagggagccaagcccatctagctggggatggcagggatgcagatgggacttgggaataaacgattgccccgggccacgtccagacaagcgatgagctaatctctgctcggtacgagggttatgtatttgccggtcagaatctgccaaaaagttcgagttcacaggctgcaagctgcagctccgcttatgtctgtctggctctgtttaatgtttaaatggcccatttctttgagccttaggctgaacagtgtggggccagagattcttagagaagaggtaatcaagctaatgagggaagacagaggaaggagggtcagctgcagggagcggtcgagcaccaggaggtgtagtgttgatctgggcatgcgtgttggatggccctccccagactgctctccttaggcgagcactgcactgcacactgcaccggtattttaaccttagattgtctttcacgagaatgcttcatgcccttctttccccattgcgtctcttttcgtggtctcaaaggaggcaaatttatattgtcagcaaagcacagcgtaagaaaaagcacacaaaaccactgtagagacttctagaccacgtgtgagtgctttggggaggttacccagtgtgctgaagtgatgtgtgcccctgattatccccataccaaacaatccaggcctccaaagcaaagttccagccagctccgtgttagtctacgagagacaaaactgtagttctcagttttcatggtgctttaagacagtggttctcaaccttcctaatgctgtggtcccttaacacagttcctcttgttgcagtgaccgcctccccatccataacataattttcattgctacttcataactgtaattttgctactgttataaagcataacgtaaatatctgtgtttcctggtggccttaggcaatcctcagagaaccactgcatatcaacgtataacttcattgatacaccgttcacgcaacatatgatttgctcatttaagcgaagaggtcattttttttttattaaatttacccagatatgcagctggcttcacactctattttaggacatcatctgaatttctgaagggaatggtgttccttttaactgtcatttccttacttcccaactctaaatagccaccaaatagccctcattcccaagctcaaagagtcttctgtctatcatgcctaaacacgaagggacctgtttctgttctgagagtgttcttgtggtcctctcgtgtgagctgactcgtatggcatcttgccttttatgacagatatttagcacctgacatgccttcaaggttcatctgtatggttataatatgtattagcacttattcctttcacagccgaataatatgccgttgaaaagacataccacaatttgcatgtagtagctgatgttcatgtatatttgggctgtttccacctttgggctattaggggtaactctgttgtgaacattcccaagcaagtttttgtgggcacaaaagcttgttatattctgttgtcaactgtaatagagcattcattcatcattgatatttttgtgtgccagatataagttggtattgttggtgcctttcttagtccatactaatttataagtaagttattgaatgaataagtgtgtataggggataaatgagtcaatttgaagatatataaagaaatagatactgttataattttaaaaaatgatgggagagagagagggacaccatcctgcaacaggcctcatatgaaaggggaaggaagaggggaggggaggggagaggctggcctctggagacagaagtggtggaggggaggaagagagagatgagagaagagagagaggaagagggaaagggggggagagggagtgagagggaggaggtgggcggggcctgcctttgattggggacatagcacatgctctgtagtgatttggcagttggcactgtcagtaccctgagcaggtcagagtactgcctgagtacagcaagcgtgtcctgcctggtgacagtctagcataatgcctgaatgctagcagatactccattctcaaggagagagtcgaataatgactttcatccaaagaataccatggagaaaagggaaagagaaacgtcatttccagtgtaataatctggtaagcacttggcttaggttaagaaacctaaaatccatggtgacaatcatattgatgcgtgtacacctaggatgtatcacatcatcatatgtacatgacccagaacacaaccacaagaccaacatcagacattctagcccagggacattccgcaaaacacttgactgaaatcctcaaaatccttgaggtaaaaccaagaacagcctgaggacctgctacccccaagactggtgtaacatggtattctaggtagcatcctataataggaaactgacatttgggaaaaaaataaaacaccaacattagctgacaatagtagggactctgggtgactgattgtcatagagagacatctatattttcaatgaatctaaaaattagataaagatttcatcttacaaacacaaatgccccacttccctaactattactctccttttcagacacatgcttctcttcagccagaacttcagtgactacagcctgtggcactgtccccaaagcattggaatcacttctgtggggaaagagaaggcaaagagaggaggaccaggcttaagcctctctctaggcactgatctcccgtgatgtgacttatctagctggatctctgttttctcacaggacagagggtgagagggttggagatgagtggacattaagaattcattttgaagtccaggctgtcccttgagcaggtaacaactcagaaagatgtaatgtatgtctggcactgggcttttttatctgatagtctatggtgtctgttggagtcattattcattccctcatcatggggtaactgaaaggttcaggcattatgctggcctgcccctgttatctggtaggatccactcagcccagggttccatgggaactaaatctgcactcaggtgcaaaggacccctttaaaagacagacccctgcccatttacactctctctactcttctctctactctctattctctccttctctgctcttctcttctcccaccctctctctctctctctctctctctctctctctctctctgtgtgtgtgtgtgtgtgtctactctgccaggcctataataaactggttaatatgtctaatatgtctcatcttgcgatcctcttcttttatttctaatttaagcaaagaataacagtaactccatctaaacaccctttataggtgtgtgtgtgtgtgtgtgtgtgtgtgtgtgtgtgtgtgtgtgtgtgtgtgtgtgtgtttgaagaagtttctaggcttccatagggaatcctcaaagatggttcgtgctagttatcctccctcctgtgactgctccagggtagcaaaaagaaatgtctcagatagtgaggtcttaggaaaaatttttatctaggtgagggctagactttctctatctgaggggtaaataaggaaacacatgccttctgatggtaatgtaagaaaaagggaacacacacacactttcctgatagtaatttacttcatcttgaataaatcaatctctctttcttgacacaattatgtctctctacatacagttgaaaatctctctctacatacatatctctctctcctgcacagccatatatctctacacacagagatctcttttcttcacagagctccattctccacacagctacctacttcacacttcttccttacacagccgcctctcatctctctctctacaattcagctacatcttcctaccaaacacacacacacacacttctcattcttcttctcacttctcacccttctttctctgccatttagctacacccttcactaagcacacacacacacacacacacacacacacacacacacacacacacacactcctctgcccagctctttacacagtagctctctacatagctctaccgaccttctctctaagccaaaaaattacatgttacattttcagggcccagcacattctcataacacaagataagtcacacagtttttttttctcaggctagggaggtcacatcgactggccagtgagtaatgcttggctgtgtatgtagctttttcccagacagaaagtgagattaaaattcaggactcagacaataaacaattaactggctgaaccttgaggtcgggagtacatgaagaaagtccattgctgagaattatgtctattaaagttgcttcaagttctgaccttgaatcagcaataaacacctgggaaactgaccccatgtatttgtctctagggacaaccagtttgccttgaatttgttctcaagtctaaaattagctgtctttgtgattgagaatactgttactttcctacgtcaatctaagtaatgtaaaatatcctagtgttatttctattcatcacaattatacagttaagcataaatcatcttcctgaccatccacagctgtgtgagtacccaatagatggaatgtataaatgagatagacacacgagcagcgagaaaacacccttagcagttcttagggaaggaatgcacacgagacggtgacagccagaagcagctgctcatttacagtcagtgactccagggctttgccaagtggggctccccatcagagagtcatttgtctggtgggtggacctgcggaacactgcgtgtcacctgctgcatacatccacagcctcctgcacctgtgcttacttttctgctctgcctttcaacccaccccaccccattcaacccttcctggcccattatccccctttctgttttcataccaccactttctatgctcccttctctcgaagtgttcccaccccatggcccattactaatctcctgcctcccgtgggcactccaatttaaatacacatatttaaagattcaacatcttccacctatgagagagatcaacaccatgctaaatgaagaaaaactcaaagcactaaaatcagaaacaagacaaggatatcccttcttttccctgctggtcagtacagtgcttgaagtcttggctaagccattagacaaaagaagaagataaagggaatacaaataggaaaggaagaagtcaaagtatcgttatttacagatgatatgattttatatctatgaaagaccctaaagacaggcaggaagaggttttcctataaggatgttccaaccagataaaaacataactgcaacgaccaggcgggcaccaacactttctaaaaagagacacatacagacagctccccagggacttaagacatccaaaatccctgcacaattcacttgtgctcccccatctcctaattgacaaatattatgttatcttcaagtcacacagtgaggagtcgagctgagattcaaacccaggtaggcagtgccccctcagagaccactatttcagacaccgtgtcacactgaacaatgcattctaaaggatttgagtatcaaattttacaaacagggcatgactccagcaatgcagaatatttagatacttcccacgggtgccacaaggcttatctgaacaggcacaggaagcgtagaaaacaaagatgggtatacaggacagttcccaagtgctgtccatcatcaccgctgttagaagccacgtgggggctactttcagccatggtgtctctgaccagcatatcaactgtagttgcttccatctggaaaacaagtctgtataaatgccctgaactgtatcaggtgaggaaggaagagacgcaaagggtaagaacatcagcaaaggtcaaggagctggaacaagagatcacctacaaggccacacatgccagtttggttccatttcctgctggtcattaaaccacaggacgttagaatagtttgagctactgagatatctgagtgacccttcctccctcctctacggctgggcagacacaccatcctctgtgcatggcaggggaggggcatataacactaagactactgggttttcaggtcaaactgactgggtatggaattcccacctaccttgctctaaattccatgatattgggcagtcaggataataccagctacattagtgtgtgtgtgtgtctgtgtgtgtgtgtgtgtgtgtgtgtgtgtgtgtgtgtagaataaacaccaagaacaactgtaaagttatgaacataatatttggcacactgatatctgataattataattattttcttggtcatgaggctgatttttctttgttttactttatgttgtcaacatccctctgaaaggagtaacacttaaactaagtaatgctttgatattgtcttggctcggatagaaacacacacacacacacacacacacacacgcacacgcagacgcacacgcacgcacacacacgcacggcatagtgcttcatatttcatatgcaatatcctgcttttgaagaggcatgacatactaaataaagctaagattcagagtaagtaagccatttgcttaagctcacacatgatcaggatgtgggctccagggtcagcggctccagaccagagctgcggtggagagaccctttctgaagcagacctggaggatgaggatggggcacaatgatggaaagtctggaaggcaaacctggccaaagagtttcagagagttgcatttcaaacccgagagccatgtgtaagactgtgtcccaaactgtactggccaccgtggaacttgaacaataacaagcagggtgctgatctcgggcacaggcgggaggcagaggttctgggctaattttatgaatacaaagaatttcctgggtttctataggttagtgggtgtatgagtgtgggtgtgagtgggtggtgtgtgagtgtgtgtgtgggggggtgtgcaagcaggtatgtgtatgagtgggttgtgtgagttagtttgtgtatgagtagnnnnnnnnnnnnnnnnnnnnnnnnnnnnnnnnnnnnnnnnnnnnnnnnnnnnnnnnnnnnnnnnnnnnnnnnnnnnnnnnnnnnnnnnnnnnnnnnnnnnnnnnnnnnnnnnnnnnnnnnnnnnnnnnnnnnnnnnnnnnnnnnnnnnnnnnnnnnnnnnnnnnnnnnnnnnnnnnnnnnnnnnnnnnnnnnnnnnnnnnnnnnnnnnnnnnnnnnnnnnnnnnnnnnnnnnnnnnnnnnnnnnnnnnnnnnnnnnnnnnnnnnnnnnnnnnnnnnnnnnnnnnnnnnnnnnnnnnnnnnnnnnnnnnnnnnnnnnnnnnnnnnnnnnnnnnnnnnnnnnnnnnnnnnnnnnnnnnnnnnnnnnnnnnnnnnnnnnnnnnnnnnnnnnnnnnnnnnnnnnncctgcactgagggcctatgtgaagttagatttaaagctaccaaggccaaaggaggacccagctgctgtgtggaagaaagtctaagaccctgagcattcccggagctttctctatggatggctacagagctcccgaggctacggatggagatggcgtgtgccaactattgtggagtgcatctctgttctactttccttccagggcagcgtgctgtcaagggaggacagaattctccccctgcccttggaagtgctgactaatcacgcaggtctagagatgagatgttgaggacactaaagttcagtcttggaggccttttctctttgttcatttcttctcctttgaggccatgccacacactgattagtggcacagacatccctccacagtcccctcccctcagtactgggtaaaacccaggtctaggacatggaacaaaggagcacaaatagttcattcccgtgaacggttagaccagatgcacttaactagaaccctgccagtaaatccagcctgcttgctggaagtgggggttttgttttactattcaacacgagtctgcaggccagttctacatgacgtcctagttggcattaacacttggcttgacacagtccagagtcacctgagaagggagtctatattgagaaattgccaaatctgctcaacctgtacagatgagtccgtggggttggcttggtggctgtagagggtccagcacactgtgggtggcacaattccccagacaggtggtctgggctgtataagaaatctagctaagagggctggatagatgtctctatggttaagagcacttggtgctcttgcagaggacccagatttggttccaagtactcacatggtgactcacaactgcctgtaactccaggatcagggggtccaatgccctgtggcctcagcaggcaccggcatacatgtggtgcatatgtattctctctctctctctctctctctctctcactctcacacacacacacacacacacacacacacttgtgcacacacaggtgcacgtgcatacatacacacatcagtttaaaaaaaaaaaaacaaagcttagcaaatcatgaacatgagatggagtcagcaagcagtgttcctccatgaaatgaatctttttctcacctaagctgcttctgcccagagtgtttttatcacagcaacagaatggaactagaacagttatcaaacacgaattggtgagaggcgtatttgcactttccccatcttgtttccataaggatacaaattatgctaaaataaaaggaacttgccatgactgggtgtctacagacatgcatgcatggatctccacacatgcaggcacacacattttaggttattcgaataaattttgtatgagaacgtggagttgcttaaaaatgctggcatcaggtacttgcctttcactacaaagatataattctaagaattactgattatccataacagagaaaagacgggcagtgacaagtctaagtagacattgaagcagagtgatgatttgcatttagcctgtcctgactctttcctgttgtccgtggacacacaatgcacacacaatgcacacacaatgtacacacacacacacacacacacacacagagagagagagagagagagagagagagagagagagagagagagtccagaaaggaacccacaacatatcacaggaaaaatttgtgcaaagctgtgatgaacccagcttgcttactggagttgctcataggaacagtgtagttggctttttctctgggccaccaacctccttccaaacaaagacacagagacttattaggaagtgtgaaagcttggccttagcttaggcttgtcccactagctcttttacttaatttaacctgtttctattcatctatattttgccttagggtttttttttaaatctttctttcattctgtatgtcctactttcctgcttcctctgtgtctgtctgtctgtccccttgcatctccctggcgtctttttttttcttcccttttctgagcctaaattcctcctcctccttactctccctgcccagaagctccacctatacctcctccctcgctattggctagctggtcagctttttattacaccaatcaggtgccttaggcaggcatggtaaaacagcaacacatctttacaaaactaaacaaatgcaatgcacctttgacaaatattctgaacagagtaggggcagctcaaaggctactatgtccctgacaagctcactccagcctaggtgacactgcacgaaagctgcgtccccgagccctttgcgtgactcacacatgcagttttacagcgtgcagatgactgccctctcatcactgatggtgttttcacctcccaggaatggcaggaccgtgtgtgtggggggggggtgggggaacggcaaagagcagagggctgaaaatgagtgtgaaaggcctgctcactccatggcatctatgggctgccccatcatccccccccacacacacacactgctggacccctctgttagtgtggacaagcatgttgtagagctcttcccttaatttgcttttctagatttgagctctcaaagcctttgtcgttgttgatctacatacagacaacctgactcagacatgtggtctcaatcacatggtaggtatagaacctccccttcctctaaaatgtgtaagaaaggatgctcactctgccactcaggcccagtctctactcagaccctgtggtgtgttgcctgcctgtctcttctattcaatctcaaccaaccaaatgagacccaggatatgtatattttttaaataaaaaatagattgagcaaaacaaagaattgtaaaagatatcaagttacatctttaccttatagcataggccaaaaactattgcagatgaaacaaagatttatacactatgctgcctggttttgtaggtcaacttggcacactctagattcatcagagaggaaggagccttagttggggaaatgcttccaagagatctagctctaaggtattttttcaattagtgatcaataggggaaggtccagcccattgtgggtggggccatccccgggttggtggtcctgggttctataagaaagcagactgaacaagccaggggagtcaagcaagtaagcagcactcctccatggcctctgtaacagctcctgtcttcaggttcctgcctccttgagttcctaccttgacttccttcagtgatggaagatgatctggaagtgtgagccaaccctttcttccccaacttgctctttggtcacggtattttgtcacagctatagaccataactaagatacatgctaagaaaagggaactgaagagatgcaagtcattatagagtaataaaggtaacccccaaaataacaagataaaaccacagaagaaaatacatgctgaaatgactcaaaataattaataattaaatgtctcacttcttttcaaacgtgataactaggtcactgtagttcattgaacttactgttactctgtattttatttttttgttaatataaaaagacttgccaggaggtccatgcctttaatctgagcacttgggaggcagacacagttggatttccaagtttgaggccagtctggtctacagagtgagctccaggacagtcagggccgaagaaaaaccctgtctcaaaaacataaaacatcaacaacaaaaaccccaaaagacaaaaaccaaaaaaaggaagaaaaaaaagaaaacttattgcttttaatttcatatttatttatgtagatgagtgttttgcttgcatgtatgcagcaagaatgtgcctgtgccccggggcatagcagaaggctctggatctcctggaactggagttatggacagttgtgagctgccatatgagtgctgggaatcgaaccctgatcttgtgcaagaacaagtgctataaattgctaaatcatctcttcagctccaagaaaactttatatgccttgtgcaacaaacatgatcaaaaaaatgaaatagcaaactggggggaaataatcacagtgtacagagaattgtcttctagaatataatatgtaaagagttctaagacatcaatatggaacatatctagttcttcacatgctgtttggggaattctgaacaataatgttcacaaatgagaattcttacaaatagagtggtgggtggaagctctaatgctcactattatccataaatgtaaactaaaaagaagggaagacacatttggcttgcagtattttgggctaaggcatctgcagataaatcaaagacgtagaattagtttttatctttggaatagcaattctactgcaagtaaattaacacagtgttcaaaatactgattttttaaagaaagatgtttttcctaatggagaactttttcaaatgttctcagaataggggattactcataagataaaaagaaacatttaaaaaatgaattttcaggaaaatatctgacatgaaaaatatgcaggaaattttacttagtaaacttaatataaactatatataaactatatatatatatatatatatatatatatatatatatatatgatacagagatacagagatggcttaattgggtaaagtgcttgctgaggaagtatgaagacagggttcaaatgtccagcacccatataaaaagccaggtatggtagtattccttctgtaactccaacatggaatggggagtggggccggaagtgggggaggaggagggagatgaaaaaaagaaagtggtaaaggaagacacacacacacacacacacacacacacaacacacacacacacacacacacacacacacacacacacacacacacacacacacacacacacacacacacacacacacacacacacacacacacacacacacacacacacacacacacacacacacacacacacacacacacacacacacacacacacacacacacacacacacacacacacacacacacacacacacacacaccacacacacacacacacacacacacacacacacacacacacacacacacacacacacacacacacacacacacacacacacacacacacacacacacacacacacacacacacacacacacacacacacacacacacacacacacacacacacacacacacacacacacacacacacacacacacacacacacacacacacacacacacacacacacacacacacacacacacacacacacacacacacacacacacacacacacacacacacacacacaacacaccacacacacacacacacacacacacacacaaacaccacacacacacacaaacaccacacacagacacacacacacacacacatacacagagttctttttttactcaaaaataaaattcatattcagaaaaaagataaacaagagaacctccgaaagtcagcatcgtgatcacctctagtgagtggtggaatttaggcagagcctctccccattcagcatgctgtcatatactttttttcaattagcatacgtcctgtgggaaaatgttggcagccagcatgagcagatgaaataggctgccctctttgtatgcctgtcaccccttcacaaaggagggatgttgttttgctgacagccctgaagatcactcaatctcatgtggcaaatccttccaggtcagaagcaaatcgagctaaagcagtgaatttgaaagcacagccaggcccacgtgttctcttctgagctcagggagaccagtacaagcggctccagggccaaaagcagcgaaacgctcactagcacaaatgtgacagcaatatttttgttcaccgatttacaaaaggcgggggcaggggttccaaccctggaaaagtacccccttgtacttttgcacagtgaattccttagggaacttcagactgggatgtagggtggtggtgttccatttggatgattttctcatgaatagtgtggaggccaaagaaagtccgtaactgatcggccccttcggagcaggaaatgctattaagactttcttcttctttttttttttttttttcctcagttttttttttttttctttctttcttttaaagtgcagccacgttgtgatatgacaccaccctgttgcggggctgtaagtactgctgttccggccaagcctctcctgggccctcgagcgcagattagcatggagggaccaactttttcatttgcatctgaaagtgcccgccacaaacagctgaggcagcatttctgcaaaggcggagaggacttgaatgtgtcctcgaggtcagtctgtctgagggctctacctccctgagagagaattctggatttcgtcctgacgctctgcccttccacagaagtagccccatcacagaagaaataccctattcatttgggaatcacaacacagttttcagttctgtaatctctccatgtactctatctttctggctcttcttcctgctgcgtctcttcctgtctgtcaccagagaggggatgtggtctcctagtcctttatttcatcatttgcaaatgtgagggggcacagtccgtgaagtcggacagattacagctctccagccctgggaatcctatcggcttttccctcccagttgtcctcactctgtgagttattcctctacaggactcttgtgggggtggggtgggggggatggccaggcaaaagaatggaactctacttccttctcaggaaaggaaaaaggttgaaattgtaaattttcccaggcttctcaagggactttcaaggaagaccaaattgcataatctcacaaaaatgtgagcagcagccctggcccctgtcggccctgataatctacagccgggggattagagagacccagaaacacatgtgctattttctgacctgtgcgtaattacagatcttcatggcaaagctgaagtgcctcaagacctgagagctatggtcgtgggaactgtgtattcaccatggtgggatccatctgcctcacagcttagctttgtaagagctatggggaaagcaacctcagcaaaccagactcagcaaactcacactgcaaacctcaccatggcacccccagcgaccgccctgagtggcagacacagcttcaaagcctttgacattgaacgtagacctacggctgatttctcagtattcaattcttcacagttgttggtgcttaaaatgtacagataaattgctgttgattaataagactggactaagagcaaagctgtcaggcttgggacgctcagccactgctcccaagggcctgggctgtactgtcccaggggagacctagcctggttggtgatgaagaatggagcctggcctggccacccagaaaggaaggttttatgggaagcggtaccctattaaattgagtgatggcttaatggagccatactgggacatgcaaagataaatgggatggaatcctcaaccttgagattgtcgcagctcagtgccaggtgtggtggcatgtttttaatccaagcaccctggaggctgaggctgtgtatgcattaacttttgaggcactgtgacgtgaccaagcctgtggcggagtcagcctaaggaggcaaagactgcttttgaatcacgggtttcaagggtctcagcccatcattatgggggaacagctgtgtctgcaagtggcagggataccatgaaggggccctaaccccaccaagtgtaccaggaagcagacagaacaggggctagcaccagaggcagaggaaaccttcaaagaccccctcctggtgacgtcgttcctcctaccaggaaggttccaaccctaaaggctctccatcttcaaggttccaagtccttcagtgttcaaagctggagtctgatggggacatttcagattctaacacggaagggagggacacaaggcctcatagtggactcaaggccagtatgagctctgcagtaagaccttgtctctcctactcaaaaagaaggtcataatccaatgggggggggaggatatataaatgaacaatcggtattctgaaaactatttctattccctgacttcaggcatggaggaaggccttcaaaagtcctttggtaaaaatccagagggaacttatctgagtcacttcagggatctttctcctggcccctaatttaatggtgtcccaaaatgggcctggtaatctcaggagaggcacaaaataatcatacagatagaaactaaaacatggtaaaatgtttgagcttttcattatatcctttacatgttactgttttagactgtaatttataacctaaggatggtttgctgtttgtcatctacaggagcactttgttgagggtgcttgtttgaaagagttctgtgccagagtgtgaacacctccaagttctaagtactctgagttcatttatctactgtctttaggtgcagggttctggatcatcgtcacttagcttttgagcagtcttgctgttctcacaagtctaacttcactcagccatctcatccatcacctatgcacagcacaagcaggacctgcctgtccctggaagccttcctcttcataagacagtctccagccaggtgatgtttctctgccacaggttcaggaggtggcagacatgtagactcatgacgtaacttgcctgatatcagagggtgtgtgatattaatgtgttatcagaaacaagccaatgggaggttgtaactcagtggtgaaaagtctacttccatggtcaaggtcatgggttccttccccagcttcacaaacaaagcagaacaaccctaattagtggatatgttgtactggtcagaagttagccaaagccttcagctgcaaagcaaaaacatgacaaaatctatcgctccaagatcatgagagcccccaaactaaagcaaaggggcaaatgaatcaccatgtatgactcacagttactggcgggatgtcaaaaccatgtagccctgagttaaagtcctatctttaccccttttgggctctaagccatggcagaacccatttgagctacaaggagtacaaattcgctcttgccaacataaactctacaggggcaggggaagggtatttttataaagaaaacagtgtcattcaaagaatgaaaagaagagctgaaagcctggccactccagagatcttggcaggatgttcagcgttctgtttctttaggacacttagacaaccctactcttgatgacttttgagttctggcctgcaatctccacacagaatgcaagttttcagaccagagatcttgactggccagctaggatatgtgcagcactttgtgggctgtgattggacagagctgagatttactgaccaggagaaaggttgatcctctgaggaaggaaagcagagccgagcaaaacaaatcatatctattaccttatttttcagttaccttgtcaggaaaatggacataaaatacagatctgggaggactgtttggaagaacaagaagatgtttgccaaagtgcataccacgaagcctagcccttcctaagccataacggcgccattgttatgacttgtatggggtcgtatgacacctttaaaggatcagactctatcttttgtaggcatggatttaagtatggagttctcctgtaggacctatttgtctcaatgtcgatggtggaatgaataagcatttggatggaaatgggataataactttagcaagaattttgttatatttatctctctttgtgcacagagtcccatcccactgctctcgatattcttcacaggctgcctgtgtgtgtgtgtgtgtgtgtgtgtgtgtgtgtgtgttcaggaagccagagggaaacctcacgtgtcattcttcaggaactgcccttggaactcactgaagggaccagcttcccttttggcagccataacggcagaacaagtgcttctatgaccttgtcctagacactagaaagtcagatgcctgtctcgtgacaaggaaccaatcagaagttagctggtggcgctatgctttacgaccctggatgtgctttatggacaagcgcacagcaatgacgcacaaagtatagtaaccaccctgggagggcctatgggccataacaaccagttgaccaatcaacacagggcaagccctccaagcctggaggcacaccaatcatgagcctgtgcgtacccctagacactccccttacgctgccctataagatctctcgggagccctaggagccgtgttttctagccatccgccatggtggatgggtgaaagacccgagctaacatggggttagctcgttaaattacaataaagcctcgtgcagtttgcagcaagctctcgaatccgcctggtgattggggtgaccgtgaacgtggcctgggaccccggatacttgagttttcgggggtctaacactcaccaagtagacctgagggactggccagcaactcacagggatctgtttccttccacctctccagagcttggattccaggcgtatgctaccaggactggccttttttctcgtgtggttctcagatgttcatgggataagtgtaagggaaagttagccattgagtaaagccaccagcaggaaggtcatggtagacagcagctctgtggtggggagtgctttcccaggtaattgagagaaatgggcagtcctacaggttgccttgccacagcatggggcagggaggcacattctggactctggtaaggaaaagaaccttatctcatgaaaggggtaattattcctcctctctttagcattgctcaaggtggctctgccttccagagatgttcctgaagggccccatctctgctctggcagcatttatatctccctggggtggtactattctagaaaagaaagcccctggagaaggcgccttgaggtaggacagttaaaggactagttaagttcaagatgcccagaaaaacattcagacaaggccggtcccagtcagcctgctccagatgcagagtaagcagatggctcttcatgcaaattggggtggtgcctccacatatgtgggtgagaatcccgctgaccaagcaaaattgggatctggtgagatgaggtggataattaaagcaacaggctctttgttgtttggttgatctgttagcttcagctaagcagttctttgatctgagcttctttctcccagctgaatctggcaaattccccttcccccagtaaccctttgccttgaacagtctacttcccctccctatttcacccactcattgagtccttcaaaacagaccaacaatatcccacacagacatccggggagaggccagagagttcttcttctcctccctctcatatggttaaaaataaaccactttcgccagacattgtgcatgtcagaaatctcattgacagtagctcattgtgtatgtagggtgtctgacaaggaactggtgtcttcctgtctgaaaattaggcagatatttagggcaacggcttttagccattaagtcactggaaaggatagaagagttttagtaaatggcaaatgtcctgagcgagctagcaagccacagctgcgtcgagttctaagctacgatacacgcattgtgtgtgtgcacaatgcatgcgtatctatgtgtgtgcttgacagataaattgtttaaggacaagttctttaagtggcagaactctgagtacatgtatgatttgattaaggcatgtgcactgtttgtatgaattgcagcaaagatatctaagtcattggctggaggatccaatgccatgcatctttggtttctaggaggctaaccattcaggtggtttccaaaatgagtttgtaaaagaaataaacatttctacagtcctttctctgacctctgatattggagtccataatttggccaggtctttgcctgttgaatctccattcttattgcttcttcatcagccttctatttctgtgtcttacagcacaaatgaatgaacatttcaatgtgtacaagacatctgtgaagactctgggagccaactgctggacgtaaagttcttctaaccttcccaagacctggagggtgaggaactgtagagattgggagtcccagtgagaggccatcattttccctctctactaaacacctccccataccatccttcctcctcacagagttgagagttgtcaacacactgacatcactggccactactagcataggtaaggacccagactaatgccggggagccagacagtgccatgagcaggtatcactttaaaaggcatttcaaagcaggtccaaagagttagtggcttgtcttgagttgaggttgtgacaataaaggtttccattttcctcagtggttaatacctggattgtattgttgacctggacacaaactccctacttgcaagccacctctctccaagggcagaaggagtctacctgcaatcaactctaacctactgacctacctcccacattcctactcaaaacctagcacgcaacttttcaccctcagcaggctgatctctgtgagttcgaggccagcctggtctacagagttccaggacaggctccaaagctacacagagaaaccttgtctcaaaaaaagaaagaaagaaaaaagaaagaaagaaagaaagaaaggaaggaaggaaggaaggaaggaaggaaggaagaagagtgagttgactagaaatggtgtgttacttttgaaacctcaaagtccactgcaagtgacatattttctccaacaatgccacacctcctaatcctccccaaacagcatcaacaactgacaaagtctcctagccccagaccatggttgggggcatctcattcaagctgccactctctatgatagttgctactgttacctccacaaaataggaacaagaacagagattaatggcttatggccatggtcatagccacgagagtaagttcctgtgttcaaactcatgtccagctaactccagggatttgtatattattttaactgtaatcagcaagtgtgatcaattgttggattttcaaaagaacctttagatgctgaaaatgcaaggtatcttgatattttattgccagtatgacagcaaccatggctgtttccaataaggagctatgggcattgtctgcttttggtaactaaaatgttagaaaaaaaaaaacagatttttttctgactcgttaaatgcatttaatgccccaaatgggtgccaaattggcaggccatgggaataattccaccacttatgcaagaaatggatgcaatggccatgtgctttgacttgcaccttggaggacctcctttgagtaggacacgaggttaatgcatccttcacacttaagtccttctttggctgccatcagccttgctgatacagatgctgggtcaactgttgtagttgtgctaggaaactttacccaagtttccaaactttcaaaagctggacctgggcaggaatgtgtattttctaaatgttcccaggcttagccaccactgcatggtggggaagtcctaacctcttataactagtacccagtgtttctttttgcttggttctattttcctacacagtgtttggagttctctttgttgccactctctgtcctcacacatacacaatgaaatgtgtgtcttaccagcatcaggaaggctgcaggaaatgtcaggctttgtcaactgaaatcaatatttactcaagatgtctttggatacatctgagtaaccagcaaatgtctgtccaaaagcttaatcagtagtctatatttaaacacagccttgccttctaagatctcttcatttttcacatattttcctcattatttcttctccacgtgttccttggtttgcttatttatttctcaacaattgtttccagagaccattgggcaaaaagaaaaacatgaagcatgcttagaaacagatagaaaagaaaacaaaaatcccactctctctgacaaagactaaaatggcaagcttctcagcggctgcttaagggaaataattgaaggaaccagcttcccttttggcagccataacggtcgaacatgtgcttctatggccttgccctagacactagaaagtcagattcctgtcttgtgacaaggaaccaatcagaagttagctggtggcgctatgctttatggctctgggtgtgctttacggacaagtgcacagcaatgacgtagagagcatagcaaccaccctgggagggcctgtgggccataacaaccagttgaccaatcaacacagcgcaagccctccaaggctggaggcacaccaatcataagcctgtgcgtacccctagacactccccttacgctgccctataagatcttttgggagcccctaggagccgtcttttctggccatctgccatggtgggtggatgaaagacccgagctaacatggggttagctcgttaaattacaataaagcctcgtgcagtttgcagcaagctctcgaatccgcctggtgattggggtgacctcgaacgtggcctgggaccccggatacttgagtttttgggggtctaacaaatatcttaatgtgacgaccttgtgattggtttggagctggtaacatggcaggtctctgaaaatcatagcaagaggaagaatataaggcaaatggcttaaattcttctgcagatgcttcagggggaaggaaaggaaaatgtacaggattgtcttagtcattgttctattgctgtgaagagacaccatgatcaaggcaactcatgaaagaaagcatctaattgggggctggcttatgtctcaggcttagtccattaccaccatggtggggagcatggcagttgagagccacatcctgttccataggcagaaagtgagagtcaggttccactccctggcgactaagcattcaaatatgtgagcctatgggggcggtcttattcaaaccaccacagtgatcttggtcttgaactacttttctttattgctgtgttttctttttaatcaattgtatgcaatctatgtattgaagagtctcctagttacagtaagtaggtttccagactagctggaaatctggaaatctggaatccacactctatagaacaatgggggtgtttctctacaaccaaaagtcttaatgatagagaaagagacttcatgaatagaagactacacccatgcatctgggctctatatgcatctgcatgtcacagattccctgacaacactgatttggagacatcttttaaagaagtacaacatatgtcattcacagccccaatacacaggccagatcaaggtcatgggcaaagcatctgctgtgcccctcccagcttctgcctgtcttagttccttttcctgttgctatgataagataagctgacagaagcagactaaaggagaaagggtttatttggattcatacttagagcgtgcagtaccctgtggtggaggtatcctggtgtaggagctcgaggcagttgcttgcattgcatccatagtcgggaagcagagaggattgctctgctcagctagctttctccgtatgcagttcaagacgcaagccaagggaatggtgccatccatatgtaagggtgatcttcccacctcaatcagcctaatcaatataaccactcatagtcatagacatgtttctaggtgattctagatcctgtcaagttgatattgatttttaattgtcatgggaacctactgggcacattgggaacactcccaacatgatgactttgagtcagaggacagatgagtgacagggattccttcccccaaatgagcccacatacttcctcctggttcactgagccaggtttgcacacagtggttccaattcttatcacacaaggcaaggaactcctctccaaagatatcccttttctcctcagtgcccagcaccacacttaagaatgtgcataacaacacattcctgtaatcccgcactccggaagtagaggcccgaggatccaagttccaggctagtccgaactatagagtaatgagaccatttctcaaaccactgacataggcaatagaccgaaaatcctaaatcttgtaacattggtgcaggaagggtttttgtttgtttgtttgttttttgttttttcactaaggaaaatgatataactggatgaatagaaaatgctagaggacttaatagaaacttggaagcagctgtggtaagggcctcaataaggctcgaatttgatgagctttctcatttaaataaaaaagaaagatttatttttatttgtgtgtgcatgtgcgggtaccttgcgtgtgtgtgtgtgtgtgtgtgtgtgtgtgtgtgtgtgtgtgtgtgtgtacctatctactgtttatttgcaggcgctctcagataccagaaaagagcattgtatcccctggggctggagttagagagagttgtgagctgcctgacatgggtgctgggaatcaaacctgggtcctttgaaacagcagtgagtgcccttagtgctgagctctctctcctgctcctggttggctggctcacaaagatacttctgatggctgctcttagcctcctccagagcagccatgctttcttctgcctttgttcccaagaatcaggtccaaccgagacgtctctctttccctctcctggagaatcttaacctgtatccagtgtcaattgagaagacaaaaaattcaagatgtaccaatgatgtaagaagatagggcagagtgagaccaggtaagtttggcaaggctgcaaaattaacatacacaaacacacacacagaaacacagacacatacacacacacactcacacacacacacacacacacagagagagagagagagagagagagagagagagagagacagagagagagagagacagagagagagctggtactaagcctttgaggtagttccaatgacccttgacactttcactttggtgcactctcgtacattgtactgaaatcagtttatgggagcaacaggaaagagctgaagtgacagtttgtcatttctgacattgaggtatgaaagaaaaggaaccgtatctcctattttattctctcccccctcctccatcatcaatcattttgaaaaaaaaaacaaaaaaaacaaacaaacaaaaaaaaaaccacctgtctcattgtggtaaccctatggagtgttgcacatggcaaggaaccaagacctctggcctgcagatggtgaggagtgagggtcacctaataacaaacacatgggtgagcttggctgtggactttctagcatagttactgccaaaaatttgagactttctgtcagaagccctagctaagtcctcacattgatgactttcctaactgcccaaagacaatacattttatttgaaactggtcgtttggagttctttattatgcagaaatagtaactaacaaagaaaggcaccttggaaccctaaaaatgagccgagagcccaaaggacagctcagagtctgcagtggcctgctgctgcttttgatttacatggtgaataaactgggaccttgcgtcacaaaggtgaccatgcatcttgccagcagctgtgagtggcagctcccagtgtcttcaggagaatggcttctacaccaactctctatccaaataatgagcagaagagctcttgtggctcactctggcttagcacaatacagacttggaaataaacaactcccgtttagacaggctagcacaacgcaagcctaccactgcattattccatctgatagtgtaaagttagggatctgagcattagacagctaatataataataatgtggtaacttacatacatgtacatacaggcaaaatatctgcacacccaattaatctttcaaagaaaaagaacacgtattggtcaataacaatgagcctacagctgcagtatcgcatgtgtcttggtttcttttggtttgctgtgataaaatactcaggccatgtcaactgaagggataaaggtgctatgtgagctcacatagtacagtccattgtggtaaagtccaggcagcggaagcatgttaccataaatctttccgccaaaagctgcctgagcctcaccgccacgtgtgagctttacaccagccgcctgcctgagttaggcccaaatgaatacacagaaacttgtattaggttcaaagctgcttggccaatgactaggattctcatctgttagctcagtcttaactatcataaacctatatattttacaagacttatcttatcggacgccttattggcgtccttccttgccggtggatcacattgtgccactggagcaggagcggaggggaaaagagggacacttcctgtttctccttcattaaatatgagtctccttgctatgtcacttcctgcctggatcagcacttctctactacatttcccagaatcctctttgactcctagtcccatctaggagtcaaaattgctgtctcattagccaaacagtattttatttaacaatcaataagataaacatacacagtacattccccatcagaagcatggaagagctggtcacatcacactcacagtcaggaaataataaatccagaaaagagtgagcagcaatctttctccatttgatacagtcctgggtcttcagaccagcaatggtcctgcccacaattaagatgaggcttcccacacaaattaatgctaccatgatcatcccctacaggcatgccctgagacccatctcccacatggtcatcccagattctgttaagtctgaaacactaactgtaacagcacggagtgcacacaacaatgcaatgaggcattacttctccctttcataagatatttcaagattacttgattaatggttattttttttttgagccacttctcttttctccccaggcatatgtcttgattatataatctatgttggcaatttagtcaatgttctattgctgggaagagacaccatgaccatggcaacacttataaaggaaataatttaattggggctggtttacagttttggagatttagtccattattatcgtggcaggaagcatgcaggcagacaggtgctggagaagtaactgggcttggcatgggcttctggaacctcagagtccaccccccagcgatacacttcctccaacaaggtcacaccaaattctttcaaatagtgttatttcctggtcaccaagtattcaaatctgtgagcccatggagactattttcattcaaaccaccacagctggtaaggctggagctggagcatggtataccctgtagcccacaaaaactcttaccagtcctccaccccacctctcaaaggatgcagcaggaactgcaagacatgaagatgtttgctggaactccaagaagatcaactcccttaaagaaaatgtggtggagaacacatattgcagtatcagcaagaagtgaatattattctggctcttctcttacattaaactgttcccacctgggtcccgtcgccgctgcagtccccaaaatgacacacggagactctattagttgccatctgttggccaatatctatggcttctattggctaactctgtcttagttagccaataactgaaattattgataacagagggggtggactctgaggttccagaagcccatgccaaggtcttatcttactgagaactccaaactcatgctattctctcctcccaggattcacattgggtgccagtatgtaaatggagacctaaattggtctagataataagaggctggagtcagatatagagggaaatgctgagagatcagagagaaggagcaagccacagcacaccttacctcctaagcatctccacagagaagagatttcctgtttgttcctgcttatatcctgttactacccagctacgtcacttcctgcctgtcggtacagacctccagacctctagggttaactagtggcaagctccattctctgacccccagacaggctttatttgtgcaagatatcaccacattagacacctgctttaccagtgccggaagtgaggggttggtcagaacagcaaagcttccaagcctgtgccattgatttaccaggtgaatcatgggcatcgaggaaatggacttcagaggccagaaaggtgacgacccacgttattcgacagtgaaaccctggaaacactgggagtgtctgagtgatccagccagtcacacagctaccagagggcacagcatgcacatggcattaagggattcagacttgaagagatggtgcacctgacgctgggatagagcaagatgaccatgaatggccagtgctccctatgttcttgctacccacccactgagcccggaagcacaagtgagctctgagggacattctccaatcccatgggacagtaagaaggcaggagagggagcccatgccctccctcctttgtgcattccttaaacacacagcggtaggcacaaggcctgcgtggctgggagagtaggacaggagatttaggtacaaagggctcttatctggcttaaacgttgttcagagagaggccaacgctccatgtacattggaagaggtgagcaatcagtttccaaacggcatgccacagatactcatttgatcagctgataagcatctttggagttgttccaggttcctttctgttgctttgataaaacatcccaacagaagcaactcacaggagacagggatttattcgtcatacaatacaaaacctgtaaccaggttataggccctcacagcagagaaggcacaggaggaggccaaagcaggtagccacatccacagccaagagcagagagaaagaaagacatgcaggctgcttgctttctcctctcttacacagttctgggtcccttgcctagggaatggtggtaccaacagtgtgtgggggcttcccaaattaataatgaagacagtcccccacagatatgtccaaagatgtgtgtgatctacataatcccccaagaacacttggttcccaggtggttctaagttgtttcaagttgacagttaaaacctaccctcataggaatcaaactgctcttcagtcagccccttcctagttgtgtgagcagtggaaaccaatgcatttcaagtcagtattctctgaatgaaggttcacagtgcctaccttctgagagattctggggaataagaagcctgcatcctggaaagctggttgggctgagctgcctgtaacagccattgctgttgtattccacatgaagaatgaaacactgagtagtttgtgagaagaggtagaatgtcagctgtatctctgatgttcattgttctaaaggtctgtagtgggctttgacaaacttaaagctagagaaaaagaaatggcctgcagagagtctcagaaaggaatgggcatgtttaggctttggggaaatgatagttttgagtgggtagaagaggttctggtaaatatgaaatactgatgtgtaagctgtggggtattatataattggttacttattatttgtgtatgtattcgtgtgtatgtattgtgtatgtattcatgtgtgtgtgtgtattgtggatgtatatgggtgtgtgtgtgtgtgtgtgtgtgtgtgtgtgtattgtgaatgtatatggatgtgtgtgtgtgtgtgtgtgtattgtgtatgtatatgggggtgtgtgtttgtgtgtgtgtgtgtgtgtgtgtgtgtattgtgaatgtatatggatgtgtgtgtgtgtgtgtgtattgtgtatgtatatgggggtgtgtgtttgtgtgtgtgtgtgtgtattgtgtatgtatatgggggtgtgtgtttgtgtgtgtgtgtgtgtgtgtgtgtattgtgtatgtatatggatgtgtgtgtgtgtattgtgtatgtatatgggtgtgtgtttgtgtgtgtgtgtgtgtgtgtgtattgtgaatgtatatgggggtgtgtgtttgtgtgtgtgtgtgtgtgtgtgtgtattgtgtatgtatatgggggtgtgtgtttgtgtgtgtgtgtgtgtgtgtgtgtattgtgaatgtatatgggggtgtgtgtttgtgtgtgtgtgtgtgtgtgtgtgtattgtgaatgtatatgggggtgtgtgtttgtgtgtgtgtgtgtgtgtgtgtgtattgtgaatgtatatgggtgtgtgtgtgtgtgtgtgtgtgtgtgtgtattgtgtatgtatatgggggtgtgtgtttgtgtgtgtgtgtgtgtgtgtgtgtattgtgtatgtatatgggggtgtgtgtttgtgtgtgtgtgtgtgtgtgtgtgtattgtgtatgtatatgggggtgtgtgtgtgtgtgtgtgtgtgtgtattgtgtatgtatatgggtgtgtgttgtgtgtgtgtgtgtgtgtgtgtgtattgtgtatgtatatggtgtgtgtgtgtgtattgtgtatgtatatgggtgtgtgtgtgtgtgtgtgtgtgtgtgtgtattgtggatgtatatgggtgtgtgtgtgtgtgtgtgtgtgtgtgtgtgtgtgtgtgtgtacatgccacagccagcatgtggaagtcagaggacagcgcctgtgagttggttctctccttccaccgtgggtcccaggaactgaactcggatcatccgtcttggcagcagacacctttgcccactgagtcatctcactggccctgggtgcctgttttagcttatggagaccattgtaagtcttggaacttgagctcactgcagtgagctttgatcggacttttcacactgatccaatggtttcagaactcagatcccctggagcatgtgttagtacacaggctgcggttcctctctccctgagcgagcttccatttgaggcgctaacaaactctaacaaggagatttgacgatgcccctgctccagaaactgcactctgaggacagctgtcttgatcaagagacagtagacaagtgagggtgtctggttagaaaaagaatggttccttagtaggctcgccctggctctccttgacctctctggcaattactgtctgcacaataccactggcaattaatcatgccttgttgtctgacatctcttttctttgcccggatgctatttacatctttttgttgttgcctttatgcttaagaaccaggcgggagagagagagagagaccaaccatggggcaatcagtgggaagtcgggaggtttccagccccgaggtgggggcaggaaaaggttaggaagcagctgggggcttcctgtgggaacgtggagctggagatagactcagactacatcataagacaggaagaaagcgagaggccggaaactcgatgcttctaggaggcacaggacagtaaaaacagtaaaaacagtaaaaagaaggctccagcataacacggaggtaggcggcccttctgcaagtgagacaaaggtggaagtgggtcctgctgagactcagaaaaggagcccaaacatcatttagcatcttactttgtcattggctggataaaagatagactatgctgctggtttgtgtgcgagtgcatgtatatgtgtttgagtgtgaatgtgtgagcatagatatgagcataggtgtgagtgtgtgtgagtgcgagatagtgtgtgtttgaatatgtgtgcctgtgtgtgtgtatgtaagtgtgattggattgtgagaatatgtgtatgagtatatatgtgcgtggagtgagtgtatgtgtatgagcgtacaagtgtgcatgtttgagtatgtgtgcttgtgtgagtgtatgtatgtgagtatgtgtgaatatgtgtgaatgtacgtgtacaagtgtgtatctgtgaatatgtgcatgcaattatatttttctgaatgtatgtttgggaatacatgtgtgtgagtgtatgtatgtgggtataaaagtgtatatgtgcgtgtaagtatctgtgaatgtgtgaatgagtgtgggtatgtgtgaatgtgtgcgtgtttgagtgtatgtgagtatacatgtgagtggtaatatctgtgaatgtatgtttgtgtgtgagtgttagtatctgtgaatgtatgtgtgagtgtggtgactgtgtgtgagtgtgtatgtgtgtgtgtgtgagtgtatgtgtgtgtgtgtgtgtgtgagtgtatgtgtgtatgtgtgtatgtgtgagtgtgtgtatgctgaagacaaagtgagttgagtgacattgattattacaagagaccaagttcatggactgatgcaatatgaatgaataagtttcaagaatatgcactgggttcaaacacttggggaaaataattttaaaggcaccgagtgaagaaaaacaacaaggtgtcagtcaaaagagaagtgcagattagtctgaaacaatctgaagtggcttctgtgttgagttcattgttgactcaaaattaacaacagcaacaatcacacaacgaagcaaaaggagactcgtgcttttccttactcggacaatgttactctcaaggccagggcaaccttccttttctgggacatagtggaaagatgaacacactagctaaaataaaatgttcctagtttcaacgtcaatgggtattcttttctttaagttgcattggttaattaaaaccacaaggtggttttgtttgcttgacatttgatccaagtatttcttggatatctttctgtttttcctagagttgatgattttctgttctgtactctcataaaatattgtatcttcacattgttctgatctttgtctcattttatatactttatggttatcttttccagagccccacttcctccttgagtccttggtctggttcaacttaacttcccagctcacagctgagaattctcagccttctcagttgggtcccctagagccagctctttcttttctccctattgctccacattttagtggttcctgttgagtaaaatgtaagggttactgctttggactagcctcctgcactgtccaacggacaggaccaatatggggtttaatggtactatggagcttttgttggttgagggacaccttctagccaattaactgggctgtagcaaatggcttggtttatggactgctccatagcttattaggcggttctcctattaggctgtgctttagctctgctcttctttcgacagtgtctgatcacactgttggctggagtcctcaggacctgctctgcttttgggagcctccctagtaagcaaattgggttttgtactctgttatttgggtgtgtcttacttctctcaaatcaactttactgactttaattgatttacgaatagaggaagtttcatatatctcaaaacattttattctgcccaataacctactcacagtgtgctatgcatagaactgttctgagggccagggaagtggctcaccagataaaagcatctgcagttttgattcctggaatccacagaaagtacacatctgtaatcccagcacagtttctgtgagatgagagggaacaaccctagaaccactgagaagcttggtgtttagccaccttggagtatacatggcaacagaaacaggagagtccctgcctcaaaagcaaagtagaaggagagaacaactcctgaaagttccttgactgccacaggtgtgcctactctggcacacgcctacagacacacttcaataataataaaaaaggaaatagttttgtagacaattatttgaatgtcgcatgaagtggaaaaaacatgatgacagattatttttctccatttctagatttgtttaatttttctctaagagttttagaatattttaactttgcaatcctgaaatttcttgtgcaaggatggaggtataagggttttgccatttctgttccataaggctagcactgacaggtgctacaccctctgaagaatcgcaccttcttcaccttcaagttttaaacttattattcctttaaacacacccctccttccactgtctctgtttgttgttctttaagatgcaaacatgattgaccagaatctttagatggttctacttgttctgagagatttccttggttttattcttagttcgttccttagggggaaaaaaggttctttctattctgtggagagaggaaggaactctgactgaatgtgtgttgttgccacaaacacaagagtgacaaggaccccagtgcctcagacccacaggatcggcagagccttccctaggaccgactccgtgaatttacggcatctctctctggactatgctcagatgtttgttggcagtatgggcaaaattaataatcgaagcttcctcctcctggatgactgtgatgactgcgacctgaggctgctcccctccagagccctcctgctgagactggcaggagggggggacaggggatgacatcaccccttcctctgaggttctgggttgttgtatagtcgctagtgcatttccatcagagtacacacagcccacctaatcccagcttttctgcatgtgtctgttctcttttcatttgcttctcactctagtgagccatgaaggacagaacactgtcccacaatgctccatgccatcattataatatcgtttcaagtctggccctatcaagtagaaggttttggttgtgccagttcttttctgttctgtaaatttttctaggctaccactagcatctggctgtgtttctttttgtctaaatctagctagttgcctttgctgtccctttctgaagggactctagcaggcccgagcataggcaacatgactctagcaggcctgagcatagccaacatgactctggcaggccttgaccttccccgttccctctgccctgctaaaaactgtgagattgcgtttctaaagctaaccacaaaggtctattcccttatttggctacctcctacttctgaggctgaataccaaggcctagctattaaggtattgaagtccagcaatccaaagccccgtgtggataccctaattaacctgcccattcaaaattgagtgcctcattctaacagggggtttccccttttactttataaactgccatcttcctatgggtcacatctgtcacctctctatatagaggcagtcctttctccctccaggacaaatacccttgctgcaatcccttgttccttccccttcttccttgtcctctatctcctgtcattgtctcttattttctgacctttatcactctggggcaaataaaatctcctttgggctgagacttggtcttgggctaacacggattcttttactttctacttaggaaagaaagattatgagctgacgtgctgtcaacacaagttctagatgtctctcaagacagcatccatggaaaataacattctaaaatcttttcatgaccccaaactgtctttttcatatatatatatatatatatatatatatatatatatatatatattttttttttggtttttcaagacagagtttttctgtggctttggaacctgtcctgggactagctttgtagaccaggctggtctcaaactcacagagatccgcctacctctgcctcctgagtgctgggattaaagtcgtgtgccaccaccacctggcgtctttttcttattcatgaatgagtttgattggatgataatatattttgatattaatttgttcttaaatatttaaaaacattatcacattgaaaggttggggattggggacaaggggacactgactgattgatcaccctttgagcaagacatctattagaagagtcatgaacacactgacagacagatggctctgaacggagttcaggcctatgtggcaaagtgtgtgtggggatcccttcccacaggttgcagaggcagtggggctgggggttctataccatatgattgataagtagtccatagtatgcacttgcagtcagtctgtctttgaattagctataagggtggcgagattctaggaaaacaagttacctcagaaaccaaattacagtggtttggggaagtaccacagttcaaccaaaatggaggagccttacaaaatggtgttgccctagctaacatttattttcttgctctttgcatactctcacattttctttatagagcaagtgtaaagtgagatttaccattttagtcatttcagtgtacaattcagttacagcaaatgcattcacacggctgggtaactaccaccactaccatttctaaacgtcctcattctgtcacataagaacgatgcaactgttgcatagtgatgattcttgactcttcttcctctctccactgcctgctgctgaccactattgtgttcttgtgaattagtctgttcttcactcctcatggaaatgacagcacacactatttgtctctttgtgtctggcctatttcacttaccatagttctttcaaggctcgtcgtccatggcatagttagcatatatgagaattttattcctttgtaaggtaggatagcatcccatcgcatgtctaccctgcattttgtttatccattcatctgttgatagatagctgggctacttctgcattgtggttatcgtgactgctgctgtgagcgccagtggactttctgagttcccatttttgattcattgggaatatacctagaagtgcaattgctgaatcgtgcagtaattctgtgtttagctttaggaagaacggccaactgtgttccacaaagactacacaattttacatcctggcaatgtattgaggcctttatttgtttatagtctcataaatacttgtttccctcctaaaggtaacagtcattctaataggtacagagtggtgtcagagggtagggatttttttgacagtgtctccatgtagcacattttagcccagagctccatagactaggcttctcgcctctgcttcctgagagctgagattgcaagtgtgcaccgccaaacctggattcagtgttcagagttagtttcccgagtgacaagtggtgctattggccgtctgcgcatcttcatggtctaccttttaattgggttggcctcttattgttgactttaaagatttgcttatatatttggatattaatctcatatctaatacacgatttgcaggcatcttctcctatcctatgagttgtcatttactctagaatgtagcatttgatagacaaaaaggttttatttaatgaaaactgcccatctataaaactgcttctagattcgttatcatggaggctatcctccatggttctttatttttttttttctagtagtttaatagtgttagctcttacatttgagtctttgatttattttgcaacagtcttcatgtttatgtaaagattcaaatgaattcttttgtatgtgatccagttttctatgctatttatttgctgtcccatttagtcccccatttgacgatggtctcaacagccctgtcgaaaattggctgattttatatctgccccacgatcctgcttgttggtttgtttaacgatgatgatgattgaatccaggagcctgtgtacaccttaacggtgcaaaggattgaagccaggagcctgtgtacaccttaatagtgatgatgattgaagccaggagcctgtgtacaccttaatggtgatgatgattgaagccaggagcctgtgtacaccttaacagtgctaaggattgaatccagggcctgtgtacactttaacagtgctaaggattgaatccaggagcctgtgtacactggggaactgctctgccactcagttattgcatcagctactgtctattgctatgacgaaacaccatgaccaaggcacattataaaagaaagcatttaattgggcgtatgcgttcagaggattatgaaagattcttaatatggttaaatgggcagtgtagcatattgatgtattagttaaactttaaaaaagttgtacttgtaactcttcaagaattgttataatttttccttttcatgacattgcattcttgtcttaggaaagctatttttcttaccttttaggtcttttttatattaccttctattcttatcagggtttatgggcatttcttaagtctatcttttgtctatttgctttttttaaaaaaaaatatgttttgttcatccatattggagtattctcttaaatgagtgttggtccttggtgttttcaaataaaactattaaagtattgctggaaaggcctatgagagatcaagcactgtctctcgtggccacccttgtaggataataagatgataagatggctttttattaatccaatcatcagtatgagatattttccctcccccctcatttagacagaagtctcctggagtctagaaaccctattttataaatgtcccaattctcttcgatgcctgtcatcatgctctgtgaggactaattactgtttattagtttgctgctgctgccataccagaacaagaagtagaaactccaaacaatggcttttctctattgaaacaagaagtttggaaattcccacctgaatggactggcccatttttcagatacagagctgacttcaaaatgcatatatttgctttagagacccacccccatactgtatccccgagctccactttcagaagtgtggctaacagtggacaggcacaatgggcccagagggaactgacagttagctgcctggttcatacaggggcatggaaacctgtttgtgctcaaagagtttctggggattcccaggaggtggtggtgaagacaaggggcttgggagagaagggcaaccgtgaatggtgagacttaggccaagcttcagagtgtgtgaggctgcaaagtgtcaggcagagccacctgctatcagtcacactttaggaagtggccctagacgaacagaagtcccactatgcacactcctctttcctcattctctcatgtcccttaggtctgtgcagaggcaattttgatagatgtatcagctacctagaagagagcctgcatgtctacatagcagagaccaagtccctttcttctctgttctcacatacaatgggccactctttaaagaactacattccccagctttcttgaagatggacaaagtcattgctctctctctctctctctctctctctctctctctctctcacacacacacacacacacacacacacaatcttatccttaaaatgatgggagtgtctgcccctctaatctacattgtacctgcaaattgtcttatgtggcataattttttttcaaactgcactctgggagccaggaggtcctcccatccttatctcagactcaagaaagtttatgtaaagtgtcctccaaagccccctgtcctgggtcaggctggcctggctctatgatgggaagaggagagaaaaacagcaaccttatctggtcattagaaacactgcatctcaagaacagctcagagacgaaccttctccaacacaggttaacgctgtttaccagtgatagcagaaacaaaacgcgcatccacatagagctcgcaaccagaaactccagtatggctgctgctttccccatcattcctgctgggtaccacaggcccctgatttgatgatgctaccctctgactcccaagtgaggtggaaaatgaagttcttcttttctggcagtactgaggaccaatcctagggcatcacgcagtgagatgagggctctaacacagtgcagccctagtcctgagatgtaagtctaaaacctcagattctttcctttttggtagcggtaaaacaaacacaaaagaaaatttgcgttctcaccatgtttaagtgtatcattaagtgtgcaaacttggttgtcctcctgtctccaccatctatccctggaatcctcttgctgtaacagcactgagctctgcaggcactgggcagtagtttttgatcccagccactggcaatctgtctacttcctgactgtgaggactcctctacgtgcctcatgtaactaattacacagtatttatctgtttgtaaccagatcatttatgtcactcaatgtcctcagtgtttactcatcttggagcataggtcaagattttcttctgcttgagaactgaccaatattctattgtgtatattatcctatagtttatctagtaatctgttgattgacacttgtgaacggtattgctgtgaacagggtctggcatcttcttttgagaggatgcaacaaggggatgtggacaaataacagaaaggccacaggacagggaaagtgcaaaagaaagtcattttgtttatatatgtatatatatatatatatatgtatatatatatatatatatatatatatatcctaaaatttcaataagtttctcaataatattccactgtcatccggtgctagggagaatctttgataatttattgatggcctttctttatatacgaaagatgtagtccatggaacacgaaacaaaccactgtttgagtaatattcaacagcctgttcctaacaacgtagccttcttatacagtcctcttcccatacagcaagtgtgcttccatgctctcattttcatggtggcgtactttatcaacagaccatagtttagtttttccattttgtatagatggactagcctctatgcattactttctttagttgattttaagttttaaaaactttcatatgtatttacttgtgtgtgtgcacacaagtgtgtgtgtgtgtgtgtgtgtgtgtgtgtgcgcgcgcgcgcgcgcgtgcgcgcgcgcatgtgtgtgtacattcacaccatggtggacatgttgaagtcaaaggcaacttgtgggaatcagttctgtcctcctgccatatagattctgggatcaaactctggtctttaggcttggcagcaagtgcccctatccaccgaatcttctcactggcccctattttcttttatttttcataaatatgttgctaacataaagcaatgtgggatgaatattatgggatacatgctgttcttgctcctaaaactgaaatcagctaaaggatttctcctgatactttatttttcaaacatgatttgtagatggggaaactttgctacctcagatttcttattcttgtgtgtttatatacgccaaaacacatacttcatgtcctaaattacagagagctccagaaaatttatggagaaatattctatgaggagattcaagacacatgctataaataaccccacaagtgaatacacataaatgcatcttacgagagaaggtcagattcatcttcttgtgagcccaatcaaaaacgattgtcactagaaaaggaggaaacaagtcttggagtgacaaagggttgttatcatcagctataaaggatgttactcccaaaagctggtccagccccaggtccacagccagtcgattgaatctatgcccaaagggcttggttgtcctggtctgttacaatggggtgcactggcgaagggttcaggcagatggaaacttgagagctataggcaatggtgttgttttaaaatgctctactggtcaagctgcttagggtaaggctgcagctcttggttaggaggaccagggtcagtcttaacaaaaacccagcactaccaaactggctgggaaccaaatatctaaatacaagaggctgtaagaagcattttacatgcaaaacatctcatagcccctagagctggattccaagaattcaaaaactgaagcatggtgtctgccttcgaagtgcccagagctggtgggggagactataaacccagatcgtagatgaatgacagttgccaggttcaacagggacccaggacaaacagtaggggactagagtgggaaagggggcttccctgtctgtatttgtcagcactgatttctgcaacagttgaatcgagatttttccaagtttgacagaggagcctggaatttaaattaagatctggttatagatgtctggctctcatttgaagagaaacagatatacatattggtctaaaggacagaaactgtagtctgtgactaagtgatgtcacaggaataccatccaaaggctggcttcagtgtgctgttcagggtgctttgggactcctagtcctcctcactccttctcttttatgtctgcttgccctgcagctgggccacggagagacttcctgtagttccagatgaaaggtgtgttttctggctctgtgtgttcttgtttcggagtctgcatttgtttgtgtctcatttcagaagcacttaggctgttttttcacaatgtgtcctttgtaaacaagctgtatgagtggcttatttattgcatgcttcaccacttgcttgacttcctaacaacaaagagccttgctctgttcagagccccattccctaaatcagtacctggcctaggatgtgtgttccataagtagccactgagaaacaaaaagcaaagagaagactttaaccccagctattagcaagagcaatgctaaggacagctatcatctggctttgtagatgggtgctggagatcagactctggtcaaacacttcactgatggaacacttccctggcccttctccagcttcttgatgttcattctccatcctcatttaaataatctgaaaacttatccattaccacttaggtggccttttaccatcttgtaagttcccccctccccctaccacccagggtctcctcctctatagccccaggctgacctcaaagtcacaattctcctttctcagtttccaaagtgctggcaagaaggtatggcactatgcctggcaggtcccttcttttaacctcaagcctgataggtagaccggttcagactcctgtgcctgaggaccgattccccccagctgatacccagtacaggcctcaaagctcactgctcacttacagagaacacacttggaaacctaccatcatgcttggtggactagcaattgtaggacacaagagtgcacatttgtctgtgtaagggtatctatcccctggagccggagttacagacagctgtgagctgcaatgtaggtgctgggaattgaacccaggtcctctagaagagcagccagagctcttaacccctgagccatttctccaggcccctttgcaagtggttttaaagaactttccttatttctgtgtttgtctcagttcgtgcatttccttgttttaactggaaatccgtatgggaagcttgctgggacacatcacagccgtgtgggggcagaggttttggtttggctctgacaccggtatcttaagatttaccctatggtcttttccccatcacatacccaatgggcttagatttcactggcggccatcagcggcccctgcagctgctgtttctcttaattcaccggatccttttatccatttttagtgtcactgacactgtcctccacaagagtcttaaacacccctggaacgtattagctctctatctcttgtgtgataatccactacctcccaaacgaacaaacccataaacatgtatctaggctagttcctttctgcagctgaaatggggcggccatcctcctcctccacgctatctgcaaagctggctcctcgctcccccacctcgcccgctccttcaattctgtaaaggcagctggagactggggtgagtgtggagaaggggagaacagcttgtctgaaatctccggaaatcaccatcattagcaactgcaccagatcaacacggccctaatagctagaacggtgacccagaaagtctgcaaaaaatgcatatttttacctcctccacaacgtgatgggaagtgcaaacactttacacttacaatattagactcaggtgcacggccaacagacactggagagttaatcagtgtgccggcacatacacacacacacacacacacacacacacacactgcagacaggcagacaggatgttaatgcacccatttctttttataaacacctgagctgtactaccgcaaactatgaaatattacactgaaatctggaagtgtgttctgctagggagatgctcggtgggtgaagtgcttgctgtgcaatcacgagggactgaatttggatccccagagcctacatacaagcccggcacagtggcagacagggtgagctgatggccagccagtgggcctgagacatgactctgcaagctcagtgagagattctgtctcaaaaagtaagatggacagagataaaagaagatactcactcctgacctttggcctcacgtacgtgagtacgacgtgtgtactcacatgggagtgtacacacacacacacacacacacacacacacacacaccctcaaaaattacctattatcactcagaacatacgcctcacttctggcagagcactccacagtcacttgtcttccgctcttcggcccctctgagagtctctgtgcaaacctctgtctactgcacaaagattcatccttgatagggatgaagaggtgcactggtctgtggctacacctcttccttgttaggggtgagagctgcactggtctatgcttacagagtgtatttagagagcagcttgacattatatcattatagtaaagtcatagtagtgggttcaccccagagcccgtgagcgccacagtcgaaagctggcaaaacttagaatcccagcatgaagtttctcctaaggagctggcaggaagcccgtttttatgctattgtgtttttctttgaaagcttcaaccatattcacttcttactcctccatccagctcttcccaaatgccttagacgacccccccccccccgtctacagagctcagtaaacattaactcttataatttcttgctgctcaataagacccaataaataacacctcatttcctcacctgagtgatgaattaagagatttaatactgaatatggaggtcagggggctggatagatggctcagcagttaagagcactgggtgctgtttcagaggatccgggttcaattcctagcacccacacggcagctcgcagctgtctgtgactccagttcctgacaccttcacacacataaagtcaaatacgatattaaaaaaaaaaaaaaagaaaatggaggtcaaaatgtcacctttgttactaacaatttggtgctatagagtgtgttttctctctccaaacaagtggcttccttctgcagaacaccagtagatgggcttacctggtcacaggtgacagtggactgaggctaaactgtccctgagtagatgctgtatgggcagaggctgtttgctctctgctatgccagcacagcaatagttgcccataattaatgcagcagtcacagccagtccactgtcaccacagcagaggtgaccaaatgcattctccttctatctgcttaccggaaacatttccaggcaaactgaccacactggatccaccttcagccccaagaattggcattcacagatctgttggaagctgctctccagccacctgccagcacagatggcaagatgcttggaaattcccagacaccttcccctacccccaaactgggctgtgtcacaacagatgatcataaacactccagacccctggctctgaccaggatgccacctctaaaattcccctcaaagcttaaccaaagtgcccagacagtggtggcacaggcctgtgaacccagcacttgggaggcagaggcaggtggatctctgtgagttcgaggccagcctggtctactgagttccaggacagccagggctgttaaacaaagaaaccctgcccccccccaaaataaactaaaaccaaccaaacagaaacccaacaacaatacgaaaaccaaaccctcaaccaaagtgaccctgtgtgggactccccttccttgttccattatcattcctccaaaacatttccagccacagaagcccaacctaatgctgaagcaaattctgttattgtttagcactatttacatttttctctcattttcaattgtcttcttatgttgaatgtttactgtgatcaatgtttccatggctatgtgcgctgagcgctgacacagcacagttctcacgctggtacacgtttttccaatacacttttacatatggaaagactaggtttgtgcacagctacacactcacatacacacatgtatacacatgtatacatgcaggcacgcatagtgttcatttttaaaaactaacatcagatgcactgaaactatactgagaagaacaaggtgtttggtgaatacacgtatttatcatgcaaatggtattctgcatattcacagaattttaaggttatcttctgaatacaaaaaccacattgtatacatttataaagacctcagagaaaatttgggctaatatgaatattgtatgaaattattatatagtgctgaagaggcatgctcttagagacattctagtgttaaagttgcctttgagaattgttaattagtgaataattaaaatgctgttggaataggttcaaggccaattaatttggattcagatttttttttttaaattgtaagaaatctatgactgccaacaagggcaattagtatacttttatttgcatgctaaaacaattcactgtgagtcccaagatgtacattttctagaatatagcactttagctttcatgttcacactggaagtgtgattctaacaatgaacaaatccaatgatggcatgcaggaagcaatggcatcataacaatgctttgtcactttgcctataaattcgacagctcttttaccgcgttcctggacgttgatgtatttgtaaccattaaaccggttatagttcccttcccttggaatgagttgctttatgaatttcaagtaattcacttgcaatgacttacctggttatttgttgaaaccaattcacttgcctgctgtcttgactgcaatctgacacttctggagtcagcttagtcagtctgtctttctccaccttcctgcccccgacaccccacatctggaagacagacctgtgctaggatgtgtcctgtcctctgttctgacctcgggggcaaggctggctccgttctgaggaccccttccaacctttacacctcctcatggtttccttgggctccacattcccttgagcactacttttctggctgaatctcccagacttagtcctgccaacctctcaattccatgcagccataacagcagttgctagtgcttgaactggactgtcaccaaaggctcacatggaaaatgcttcatccacaacacagcgccactgggaggtggtgggcctctaggagttggggcgtaatgggatatcctctggtcactggtcatgcaaacacaaagggaattgtgggagcctgttctcttcttgcctctccttttcttcctggccttgaagttagagagtttgctcttccacaccatatgccacggtgcactgccttaccataggcccaaagcaacatggccaatgaatcttggattgaagccgccaaagctgtaatccaaaataaattgattttctttgtaagttgtatgtctgagtacttgttatagtaacatgaagttgattacaaggagatgaactcaattcgtggcttacaatatcatgccactcaggaaaagtatctagttctttttaacaatggaggtgctacttctgaaagatctatttggctaaataaatacacttttcctataagtaatatgatcgatagtaactacaataattttaatcattacaaccagagtacttgtattttaaaaatatagcgtttcatcccatacttaaaacaatatctaacttttgattattaaatgaatccaaagcttcaagagatgtttaaatttctttgctctagcatccaaacaaatttcaaatacatagaaaataattgaaaacagtctagtaaactcaccacatacgaaacaaggcttttttgtagctaattgtggatgctaactgaagacacatatttggttatatagaccacaaactatattgaactgaaatatccaagtccataaaaagtacctattttgctgaaattaagagattaattattttaatatttgtttcacttacttagcacatgtcggtgccaagtgtctatgggagcatgtgtgtgaggaggccagaggtcaccagatgttgtcttcctcaccttgtcttttgagacagagtctcttggtgagcctggagctcaccagtttggcagcattaggcaggtggtgtgagttagtaggctaatcttcacggagcttccagatgcgcagtgccacacttggcttggcacgtggggatctaaatgaaagtcctcgtgtctgtgaggcaagcaccttgatgactaagctatcccccagttcatcttaattcttaacacatgtaacagcatgtacctgtcttttgctatctattcaatttactgctgggcattcagtctgtcagtcttgcaataagatacagactgccataacgtttaggaaaggctgcttcattagtgactcaagacatgagtgcctctctaccttttcctagtggaggccatgggacacctacctcttcttcctttctagtgcctctaaatcttttaagcctggaaaaaaagcctgttgatcaactagctgtccacatgggtttccagcctgataaaaaagtctttcccagagtcacatgaaagtttggttccagaactgaaagtttaaggtgagggagctcaaggaggcttttgctctttgtggcaggtgagcattattgggaacccagtgtgtgacaagaaaatgatagatattgcttggacatcatcaatctgtttccttttctgcctggagggcacccacactactgcccaagtacgtggagaatagaagcagtcagcctctcggggttcatcttgtcccatttataactctaaagccccagaggactcagcttttgggttgtattccattttgacaaatcactcagaaggctgccagagataataatctcccccgaggaagcgcatacttcgcatggctgctttcctcttaaactgaaaggctggggcatgagtttggcgtaatgtcttttcctaactccacctctaaaagttagctcatattaatggaaacaagttcctagcagttactttcatgctggcagcaacacttactttttaaaagggctctgtttatgttgcccaggcttgcctggaactcccagttaacccagcctggtctaaagtgtggctcttcctccctcaggctcctgagtgttgagacctcaggggcataccaccacacccagatctgattcacactttttcttgaagggctctgggtgtagttcagtccagcttgcctagcatgttcaaggttcagggttcaatccccagaatggtaaagcaaaagaaaacagaatcagatgttgttaagaaacacaaaagccctttgtcagttagccgtgacctttcaacatggcagggagttatttctgcactgccccaactatcgctgtgaaaaggcaacaagaactctcaaataatattgaactgtatcaaactgctaacccattgcggcaaaaggtgagaacccgcccgtggatcacaatcctaactaaacagttctcttcgtagagtgtttctctggagccagacattaatcaacttcctgccttctcagcactaactcagtgaactctcacaatgaccccaggaggtaggttctatttttaccctctgttcgaaataggaaaacaacagaagttaagtaacatctaaaatgatgtagctggcaagtggcaaaggcagtatttgaaccattattggtaccgtttgctgccaacattcacctcagcagccacagtgaagtctcatcaaaaccgttacctgtcactttgtgaatcagtgtggtccacgtgacaagctaaggcttcatttcgcccctgtgtctaaccacaacttcattatccaagtgctgagtcatttcccttttctgtgctaaggcatatggacatcccgggcagcctcaccttctggacattgctcttagcactatcctttctaagagaagctacaggttcaaggggggaagtctggagtcttccaggttaggatggtgtcatgtaatgaattcctccaaactgaaactttctatttctgagggaagatgggtcagtcttgagaagttctaagggaaggctcattaagatgcaggaagttaacaactgacaagtatcgggaagtccctgagacttgtcagatgcacagaccaccctcctcccagggatatgtaagcagtaacgactgctaaaaagagattctgtagcctattgagctgcctgcaaatagtctcggttctagctttcacgagtcatggcccatgccaagggggattctgagtgatgcaactgcctttgagttattcctactcctgtaagtaaccgccgtccacattcctgtgagtaacccaataacctcattggttcaccaa
